(19) United States
(12) Patent Application Publication
(10) Pub. No.: US 2022/0291220 A1
(43) Pub. Date: Sep. 15, 2022

(54) METHODS AND COMPOSITIONS FOR DETECTION AND TREATMENT OF LUNG CANCER

(71) Applicant: OncoCyte Corporation, Alameda, CA (US)

(72) Inventors: Lyndal K. Hesterberg, Alameda, CA (US); Philip R. McQuary, Alameda, CA (US); Karen A.F. Copeland, Alameda, CA (US)

(21) Appl. No.: 17/627,607

(22) PCT Filed: Jul. 15, 2020
(86) PCT No.: PCT/US2020/042146

§ 371 Date: Jan. 14, 2022

Related U.S. Application Data
(60) Provisional application No. 62/874,309, filed on Jul. 15, 2019.

(51) Int. Cl. G01N 33/574; G01N 33/68

(52) U.S. Cl. CPC G01N 33/57423; G01N 33/6872; G01N 2333/475

(57) ABSTRACT

Disclosed herein are methods for detecting whether a subject is at risk of lung cancer based on a blood-based multivariate gene expression classifier. Methods for determining whether to obtain a biopsy in a subject based on a blood-based multivariate gene expression classifier are also disclosed. Further disclosed are methods for treating lung cancer based on a blood-based multivariate gene expression classifier are disclosed. Kits for detecting the expression levels of biomarkers for determining whether a subject is at risk of lung cancer are also disclosed.

### CROSS-REFERENCE TO RELATED APPLICATION

[0001] This application claims benefit of U.S. Provisional Application No. 62/874,309, filed Jul. 15, 2019, and is hereby incorporated herein by reference in its entirety.

### FIELD OF THE INVENTION

[0002] The present disclosure relates to lung cancer and the detection, diagnosis, and treatment of lung cancer.

### BACKGROUND OF THE INVENTION

[0003] Lung cancer is the leading cause of cancer death in the United States. However, lung cancer typically does not cause signs and symptoms in its earliest stages. More than 80 percent of patients with lung cancer are diagnosed at an advanced stage, and only 16.6% of all lung cancer patients are alive five or more years after diagnosis. See Gould M K. Clinical practice. Lung-cancer screening with low-dose computed tomography. N Engl J Med. 2014; 371(19):1813-1820. doi:10.1056/NEJMcp1404071; Howlader N, Noone A M, Krapcho M, Neyman N, Aminou R, Waldron W, Altekruse S F, Kosary C L, Ruhl J, Tatalovich Z, Cho H, Mariotto A, Eisner M P, Lewis D R, Chen H S, Feuer E J, Cronin K A (eds). SEER Cancer Statistics Review, 1975-2009. Therefore, early and accurate detection and diagnosis of lung cancer is important for a patient to achieve the best possible outcome.

[0004] Detection and diagnosis of lung cancer typically include two stages: (1) initial evaluation using imaging tests to detect abnormal masses and nodules; and (2) biopsy procedure to determine whether a suspected mass or nodule is benign or malignant.

[0005] X-ray imaging or a CT scan can be used in the initial evaluation of lung cancer, with CT scan being more sensitive for revealing smaller lesions in the lung that cannot be detected on an X-ray. One variation of CT scan known as helical low dose computed tomography (LDCT) have shown benefit for high risk patients. However, LDCT screening is not without risk. In the prospective National Lung Cancer Screening Trial (NLST), it was shown that 96.4% of the positive screening results were false positives, leading to unnecessary further testing in those patients. See National Lung Screening Trial Research Team, Aberle D R, Adams A M, et al. Reduced lung-cancer mortality with low-dose computed tomographic screening. N Engl J Med. 2011; 365(5):395-409. doi:10.1056/NEJMoal102873.

[0006] Once a mass or nodule is detected in the initial evaluation, tissue samples can be removed in a biopsy procedure and examined for the presence of abnormal cells. A biopsy can be performed in a number of ways including bronchoscopy, mediastinoscopy, and needle biopsy. A biopsy sample can also be taken from lymph nodes or other areas where cancer has spread, such as the liver. Analysis of the biopsy sample identifies whether the suspected mass or nodule is benign or malignant, as well as specific characteristics of the cancer cells present, which helps to determine prognosis and guide treatment.

[0007] To reduce unnecessary biopsy testing, noninvasive detection and diagnostic tests are desired to improve the specificity of the initial evaluation, and to provide a definitive diagnosis for benign nodules so that unnecessary invasive procedures could be avoided.

[0008] Methods and compositions have been reported for diagnosing lung cancer in a mammalian subject by use of 10 or more selected genes from the blood of the subject. For example, International Publication No. WO 2017/223216 provides 559 target sequences and genes for the diagnosis of lung cancer. However, in practice, use of the listed biomarkers has resulted in a high rate of misdiagnosis for patients with lung nodules in the size range of 0.8 cm-2 cm.

[0009] Therefore, improved methods of detecting and diagnosing lung cancer, including new biomarkers that can detect and diagnose lung cancer with improved accuracy are desired. Further, sets of biomarkers that can be used to determine whether lung nodules in the size range of 0.8 cm-2 cm are also desired.

### SUMMARY OF THE INVENTION

[0010] The present disclosure provides for, and includes, methods for detecting whether a subject is at risk of lung cancer based on a blood-based multivariate gene expression classifier. The present disclosure further provides for, and includes methods for determining whether to obtain a biopsy in a subject based on a blood-based multivariate gene expression classifier. The present disclosure also provides for, and includes, methods for treating lung cancer based on a blood-based multivariate gene expression classifier. Moreover, the present disclosure provides for, and includes kits for detecting the expression levels of biomarkers for determining whether a subject is at risk of lung cancer.

[0011] In an aspect, the present disclosure provides for, and includes a method comprising: determining whether a subject is at risk of lung cancer by: obtaining or having obtained non-invasively a biological sample from the subject; detecting expression level of ABCC13 in the biological sample; and comparing the expression level of ABCC13 to a reference level to determine if the subject is at risk of lung cancer; providing a recommendation that the subject is at risk of lung cancer based on said comparing. In one aspect, the present disclosure provides for, and includes, a method comprising: determining whether a subject is at risk of lung cancer by: obtaining or having obtained non-invasively a biological sample from the subject; detecting expression level of ABCC13 in the biological sample; and comparing the expression level of ABCC13 to a reference level to determine if the subject is at risk of lung cancer; if the subject is at risk of lung cancer, obtaining or having obtained a biopsy from the subject to test for lung cancer. In an aspect, a method for treating a subject in need of cancer treatment is provided, the method comprising obtaining or having obtained non-invasively a biological sample from the subject; detecting expression levels of biomarkers of ABCC13 in the biological sample; comparing the expression level of ABCC13 to a reference level to determine if the subject is at risk of lung cancer; and administering or having administered a lung cancer therapy if the subject is determined to be at risk of lung cancer based on the comparing step. In an aspect, the lung cancer therapy is selected from the group consisting of surgery, chemotherapy, radiation therapy, targeted therapy, and immunotherapy. In one aspect, a biological sample is blood.

[0012] In an aspect, the present disclosure provides for, and includes, a method comprising: determining whether a subject is at risk of lung cancer by: obtaining or having obtained non-invasively a biological sample from the subject; detecting expression level of ADCK3 in the biological sample; and comparing the expression level of ADCK3 to a reference level to determine if the subject is at risk of lung cancer; providing a recommendation that the subject is at risk of lung cancer based on said comparing. In one aspect, the present disclosure provides for, and includes, a method comprising: determining whether a subject is at risk of lung cancer by: obtaining or having obtained non-invasively a biological sample from the subject; detecting expression level of ADCK3 in the biological sample; and comparing the expression level of ADCK3 to a reference level to determine if the subject is at risk of lung cancer; if the subject is at risk of lung cancer, obtaining or having obtained a biopsy from the subject to test for lung cancer. In an aspect, a method for treating a subject in need of cancer treatment is provided, the method comprising obtaining or having obtained non-invasively a biological sample from the subject; detecting expression levels of biomarkers of ADCK3 in the biological sample; comparing the expression level of ADCK3 to a reference level to determine if the subject is at risk of lung cancer; and administering or having administered a lung cancer therapy if the subject is determined to be at risk of lung cancer based on the comparing step. In an aspect, the lung cancer therapy is selected from the group consisting of surgery, chemotherapy, radiation therapy, targeted therapy, and immunotherapy. In one aspect, a biological sample is blood.

[0013] In an aspect, the present disclosure provides for, and includes, a method comprising: determining whether a subject is at risk of lung cancer by: obtaining or having obtained non-invasively a biological sample from the subject; detecting expression level of GALNT14 in the biological sample; and comparing the expression level of GALNT14 to a reference level to determine if the subject is at risk of lung cancer; providing a recommendation that the subject is at risk of lung cancer based on said comparing. In an aspect, the present disclosure provides for, and includes, a method comprising: determining whether a subject is at risk of lung cancer by: obtaining or having obtained non-invasively a biological sample from the subject; detecting expression level of GALNT14 in the biological sample; and comparing the expression level of GALNT14 to a reference level to determine if the subject is at risk of lung cancer; if the subject is at risk of lung cancer, obtaining or having obtained a biopsy from the subject to test for lung cancer. In an aspect, a method for treating a subject in need of cancer treatment is provided, the method comprising obtaining or having obtained non-invasively a biological sample from the subject; detecting expression levels of biomarkers of GALNT14 in the biological sample; comparing the expression level of GALNT14 to a reference level to determine if the subject is at risk of lung cancer; and administering or having administered a lung cancer therapy if the subject is determined to be at risk of lung cancer based on the comparing step. In an aspect, the lung cancer therapy is selected from the group consisting of surgery, chemotherapy, radiation therapy, targeted therapy, and immunotherapy. In one aspect, a biological sample is blood.

[0014] In an aspect, the present disclosure provides for, and includes, a method comprising: determining whether a subject is at risk of lung cancer by: obtaining or having obtained non-invasively a biological sample from the subject; detecting expression level of GNAI2 in the biological sample; and comparing the expression level of GNAI2 to a reference level to determine if the subject is at risk of lung cancer; providing a recommendation that the subject is at risk of lung cancer based on said comparing. In an aspect, the present disclosure provides for, and includes, a method comprising: determining whether a subject is at risk of lung cancer by: obtaining or having obtained non-invasively a biological sample from the subject; detecting expression level of GNAI2 in the biological sample; and comparing the expression level of GNAI2 to a reference level to determine if the subject is at risk of lung cancer; if the subject is at risk of lung cancer, obtaining or having obtained a biopsy from the subject to test for lung cancer. In an aspect, a method for treating a subject in need of cancer treatment is provided, the method comprising obtaining or having obtained non-invasively a biological sample from the subject; detecting expression levels of biomarkers of GNAI2 in the biological sample; comparing the expression level of GNAI2 to a reference level to determine if the subject is at risk of lung cancer; and administering or having administered a lung cancer therapy if the subject is determined to be at risk of lung cancer based on the comparing step. In an aspect, the lung cancer therapy is selected from the group consisting of surgery, chemotherapy, radiation therapy, targeted therapy, and immunotherapy. In one aspect, a biological sample is blood.

[0015] In an aspect, the present disclosure provides for, and includes, a method comprising: determining whether a subject is at risk of lung cancer by: obtaining or having obtained non-invasively a biological sample from the subject; detecting expression level of PPM1M in the biological sample; and comparing the expression level of PPM1M to a reference level to determine if the subject is at risk of lung cancer; providing a recommendation that the subject is at risk of lung cancer based on said comparing. In an aspect, the present disclosure provides for, and includes, a method comprising: determining whether a subject is at risk of lung cancer by: obtaining or having obtained non-invasively a biological sample from the subject; detecting expression level of PPM1M in the biological sample; and comparing the expression level of PPM1M to a reference level to determine if the subject is at risk of lung cancer; if the subject is at risk of lung cancer, obtaining or having obtained a biopsy from the subject to test for lung cancer. In an aspect, a method for treating a subject in need of cancer treatment is provided, the method comprising obtaining or having obtained non-invasively a biological sample from the subject; detecting expression levels of biomarkers of PPM1M in the biological sample; comparing the expression level of PPM1M to a reference level to determine if the subject is at risk of lung cancer; and administering or having administered a lung cancer therapy if the subject is determined to be at risk of lung cancer based on the comparing step. In an aspect, the lung cancer therapy is selected from the group consisting of surgery, chemotherapy, radiation therapy, targeted therapy, and immunotherapy. In one aspect, a biological sample is blood.

[0016] In an aspect, the present disclosure provides for, and includes, a method comprising: determining whether a subject is at risk of lung cancer by: obtaining or having obtained non-invasively a biological sample from the subject; detecting expression level of ZER1 in the biological sample; and comparing the expression level of ZER1 to a reference level to determine if the subject is at risk of lung cancer; providing a recommendation that the subject is at risk of lung cancer based on said comparing. In an aspect, the present disclosure provides for, and includes, a method comprising: determining whether a subject is at risk of lung cancer by: obtaining or having obtained non-invasively a biological sample from the subject; detecting expression level of ZER1 in the biological sample; and comparing the expression level of ZER1 to a reference level to determine if the subject is at risk of lung cancer; if the subject is at risk of lung cancer, obtaining or having obtained a biopsy from the subject to test for lung cancer. In an aspect, a method for treating a subject in need of cancer treatment is provided, the method comprising obtaining or having obtained non-invasively a biological sample from the subject; detecting expression levels of biomarkers of ZER1 in the biological sample; comparing the expression level of ZER1 to a reference level to determine if the subject is at risk of lung cancer; and administering or having administered a lung cancer therapy if the subject is determined to be at risk of lung cancer based on the comparing step. In an aspect, the lung cancer therapy is selected from the group consisting of surgery, chemotherapy, radiation therapy, targeted therapy, and immunotherapy. In one aspect, a biological sample is blood.

[0017] In an aspect, a method of the present disclosure further comprises detecting expression level of a set of biomarkers comprising one or more biomarkers selected from the list of biomarkers in Table 1, Table 2, and Table 3.

[0018] In an aspect, the present disclosure provides for, and includes, a kit comprising a probe for detecting the expression level of ABCC13 for determining whether a subject is at risk of lung cancer. In one aspect, a probe for detecting the expression level of ABCC13 is a nucleic acid probe comprising nucleic acid sequence of SEQ ID NO: 1, complements thereof, or fragments thereof having at least 15 nucleotides.

[0019] In an aspect, the present disclosure provides for, and includes, a kit comprising a probe for detecting the expression level of ADCK3 for determining whether a subject is at risk of lung cancer. In one aspect, a probe for detecting the expression level of ADCK3 is a nucleic acid probe comprising nucleic acid sequence of SEQ ID NO: 4, complements thereof, or fragments thereof having at least 15 nucleotides.

[0020] In an aspect, the present disclosure provides for, and includes, a kit comprising a probe for detecting the expression level of GALNT14 for determining whether a subject is at risk of lung cancer. In one aspect, a probe for detecting the expression level of GALNT14 is a nucleic acid probe comprising nucleic acid sequence of SEQ ID NO: 22, complements thereof, or fragments thereof having at least 15 nucleotides.

[0021] In an aspect, the present disclosure provides for, and includes, a kit comprising a probe for detecting the expression level of GNAI2 for determining whether a subject is at risk of lung cancer. In one aspect, a probe for detecting the expression level of GALNT14 is a nucleic acid probe comprising nucleic acid sequence of SEQ ID NO: 25, complements thereof, or fragments thereof having at least 15 nucleotides.

[0022] In an aspect, the present disclosure provides for, and includes, a kit comprising a probe for detecting the expression level of PPM1M for determining whether a subject is at risk of lung cancer. In one aspect, a probe for detecting the expression level of PPM1M is a nucleic acid probe comprising nucleic acid sequence of SEQ ID NO: 91, complements thereof, or fragments thereof having at least 15 nucleotides.

[0023] In an aspect, the present disclosure provides for, and includes, a kit comprising a probe for detecting the expression level of ZER1 for determining whether a subject is at risk of lung cancer. In one aspect, a probe for detecting the expression level of ZER1 is a nucleic acid probe comprising nucleic acid sequence of SEQ ID NO: 67, complements thereof, or fragments thereof having at least 15 nucleotides.

[0024] In an aspect, a kit of the present disclosure further comprises additional probes for detecting the expression levels of one or more biomarkers selected from the list of biomarkers in Table 1, Table 2, and Table 3.

### BRIEF DESCRIPTION OF THE DRAWINGS

[0025] The present disclosure is disclosed with reference to the accompanying drawings, wherein:

[0026] FIG. 1A is a plot illustrating the performance of the gene expression classifier in accordance with the present disclosure compared to the Mayo Clinic model;

[0027] FIG. 1B is a scatter plot assessing individual classification of all benign and malignant lung nodules in a validation population in accordance with the present disclosure;

[0028] FIG. 1C illustrates the calculation of the probability that nodules identified as benign by the gene expression classifier in accordance with the present disclosure truly are benign;

[0029] FIG. 2A is a plot of gene expression classifier in accordance with the present disclosure in distinguishing benign from malignant nodules across gender;

[0030] FIG. 2B is a plot of gene expression classifier in accordance with the present disclosure in distinguishing benign from malignant nodules across various nodule sizes;

[0031] FIG. 2C is a plot of gene expression classifier in accordance with the present disclosure in distinguishing benign from malignant nodules across various fungal geographic distribution;

[0032] FIG. 3 is a plot of gene expression classifier performance for clinically challenging cases in accordance with the present disclosure.

### DETAILED DESCRIPTION

[0033] In an aspect, the present disclosure provides for, and includes, a multivariate gene expression classifier that identifies benign from malignant nodules between 0.5 cm to 3.0 cm with high accuracy in a diverse population of current and former smokers. In one aspect, the classifier of the present description, which is based on biomarkers only, significantly outperforms the Mayo Model for cancer risk that utilizes nodule size as one of the variables. In an aspect, the classifier of the present description is a non-invasive gene expression classifier that provides a biological assessment of the risk of cancer with predictive value independent of nodule size or clinical factors.

[0034] The present disclosure provides for, and includes, methods for detecting whether a subject is at risk of lung cancer based on a blood-based multivariate gene expression classifier. The present disclosure further provides for, and includes methods for determining whether to obtain a biopsy in a subject based on a blood-based multivariate gene expression classifier. The present disclosure also provides for, and includes, methods for treating lung cancer based on a blood-based multivariate gene expression classifier. Moreover, the present disclosure provides for, and includes kits for detecting the expression levels of biomarkers for determining whether a subject is at risk of lung cancer.

[0035] In an aspect, methods in accordance with the present disclosure support improved care for patients for whom clinical management is not straightforward by identifying the subset of patients at low risk of malignancy. In an aspect, methods of the present disclosure support improved care for patients having pulmonary nodules between 0.5 cm to 3.0 cm, such as, between 0.8 cm to 3.0 cm, or between 0.8 cm to 2.0 cm. In an aspect, malignant nodules are identified by the Mayo Clinic model. See Swensen S J, Silverstein M D, Ilstrup D M, Schleck C D, Edell E S. The probability of malignancy in solitary pulmonary nodules. Application to small radiologically indeterminate nodules. Arch Intern Med. 1997; 157(8):849-855. In one aspect malignant nodules are identified by predictive models selected from the group consisting of the Veterans Association model (Gould M K, Ananth L, Barnett P G. A clinical model to estimate the pretest probability of lung cancer in patients with solitary pulmonary nodules. Chest. 2007; 131:383-8), the Brock University model (McWilliams A, Tammemagi M C, Mayo J R, Roberts H, Liu G, Soghrati K, et al. Probability of cancer in pulmonary nodules detected on first screening CT. N Engl J Med. 2013; 369:910-9), and the Herder Model (Herder G J, van Tinteren H, Golding R P, Kostense P J, Comans E F, Smit E F, et al. Clinical prediction model to characterize pulmonary nodules: validation and added value of 18F-fluorodeoxyglucose positron emission tomography. Chest. 2005; 128:2490-6.)

[0036] In an aspect, methods and compositions of the present disclosure detect, diagnose, or treat lung cancer. In one aspect, lung cancer is non-small cell lung cancer (NSCLC). In an aspect, lung cancer is lung adenocarcinoma (AC or LAC). In one aspect, lung cancer is lung squamous cell carcinoma (SCC or LSCC). In an aspect, lung cancer is a stage I or stage II NSCLC. In one aspect, lung cancer is a mixture of early and late stages and types of NSCLC. In an aspect, lung cancer is a lung carcinoid tumor. In an aspect, a lung carcinoid tumor is a typical carcinoid tumor of the lung. In one aspect, a lung carcinoid tumor is an atypical carcinoid tumor of the lung. In an aspect, lung cancer is adenosquamous carcinoma of the lung (ASC), which is a malignancy containing components of AC and SCC.

[0037] Unless defined otherwise herein, terms are to be understood according to conventional usage by those of ordinary skill in the relevant art. Where a term is provided in the singular, the inventors also contemplate aspects of the disclosure described by the plural of that term. Where there are discrepancies in terms and definitions used in references that are incorporated by reference, the terms used in this application shall have the definitions given herein. Other technical terms used have their ordinary meaning in the art in which they are used, as exemplified by various art-specific dictionaries, for example, “The American Heritage® Science Dictionary” (Editors of the American Heritage Dictionaries, 2011, Houghton Mifflin Harcourt, Boston and New York), the “McGraw-Hill Dictionary of Scientific and Technical Terms” (6th edition, 2002, McGraw-Hill, New York), or the “Oxford Dictionary of Biology” (6th edition, 2008, Oxford University Press, Oxford and New York).

[0038] All publications, patents, and patent applications mentioned in this disclosure are herein incorporated by reference to the same extent as if each individual publication, patent, or patent application was specifically and individually indicated to be incorporated by reference.

[0039] The term “and/or” when used in a list of two or more items, means that any one of the listed items can be employed by itself or in combination with any one or more of the listed items. For example, the expression “A and/or B” is intended to mean either or both of A and B, i.e., A alone, B alone, or A and B in combination. The expression “A, B and/or C” is intended to mean A alone, B alone, C alone, A and B in combination, A and C in combination, B and C in combination, or A, B, and C in combination.

[0040] As used herein, terms in the singular and the singular forms “a,” “an,” and “the,” for example, include plural referents unless the content clearly dictates otherwise.

[0041] Where a range of values is provided, it is understood that each intervening value, between the upper and lower limit of that range and any other stated or intervening value in that stated range is encompassed within the disclosure. The upper and lower limits of these smaller ranges may independently be included in the smaller ranges, and are also encompassed within the disclosure, subject to any specifically excluded limit in the stated range. Where the stated range includes one or both of the limits, ranges excluding either both of those included limits are also included in the disclosure. Whenever the phrase “comprising” is used, variations such as “consisting essentially of” and “consisting of” are also contemplated.

[0042] The term “about,” as used herein, is intended to qualify the numerical values that it modifies, denoting such a value as variable within a margin of error. When no particular margin of error, such as a standard deviation to a mean value, is recited, the term “about” should be understood to mean that range which would encompass the recited value and the range which would be included by rounding up or down to that figure, taking into account significant figures.

[0043] As used herein, a “subject” can be a human or an animal.

[0044] As used herein, the terms “administer,” “administering,” or “administration” in reference to a dosage form of the disclosure refers to the act of introducing the dosage form into the system of a subject in need of treatment. When a dosage form of the disclosure is given in combination with one or more other active agents (in their respective dosage forms), “administration” and its variants are each understood to include concurrent and/or sequential introduction of the dosage form and the other active agents. Administration of any of the described dosage forms includes simultaneous (parallel) administration, sequential (stepwise) administration, co-administration, or separate administration, in which the therapies are administered separately at approximately the same time, e.g., within about a few seconds to a few hours of one another.

[0045] As used herein, the term “biomarker” refers to a biological molecule found in blood, other body fluids, or tissues that is a sign of a normal or abnormal process, or of a condition or disease, such as cancer. Biomarkers typically differentiate an affected patient from a person without the disease, due to a number of factors including germline or somatic mutations, transcriptional changes, and post-translational modifications. A biomarker can be selected from a group consisting of a protein (e.g., an enzyme or receptor), a nucleic acid (e.g., a messenger RNA, a microRNA or other non-coding RNA), an antibody, and a peptide. In an aspect, a biomarker can also be a collection of alterations, such as gene expression, proteomic, and metabolomic signatures.

[0046] As used herein, the term “gene expression classifier” refers to a set of biomarkers for which the gene expression profile is used to diagnose lung cancer.

[0047] As used herein, the terms “control” and “control subject” refer to the source of a reference level of a particular gene, reference gene expression profiles, as well as particular panel of control subjects described herein.

[0048] As used herein, the term “sample” means any biological fluid or tissue that contains immune cells, cancer cells, or a combination thereof.

[0049] As used herein, the term “cancer” refers to or describes the physiological condition in mammals that is typically characterized by unregulated cell growth.

[0050] As used herein, the term “tumor” refers to all neoplastic cell growth and proliferation, whether malignant or benign, and all pre-cancerous and cancerous cells and tissues.

[0051] As used herein, the term “nodule” refers to an abnormal buildup of tissue which is benign.

[0052] As used herein, the term “cancerous tumor” refers to a malignant tumor.

[0053] As used herein, the term “malignant” refers to a disease state where abnormal cells divide without control and can invade nearby tissues.

[0054] As used herein, the terms “benign” or “nonmalignant” refer to a generally harmless state where cells can grow larger but do not spread to other parts of the body.

[0055] As used herein, the terms “diagnosis” and “evaluation” refer to a diagnosis of a lung cancer, a diagnosis of a stage of lung cancer, a diagnosis of a type or classification of a lung cancer, a diagnosis or detection of a recurrence of a lung cancer, a diagnosis or detection of a regression of a lung cancer, a prognosis of a lung cancer, or an evaluation of the response of a lung cancer to a surgical or non-surgical therapy. In an aspect, the terms “diagnosis” and “evaluation” refer to distinguishing between a cancerous tumor and a benign nodule.

[0056] As used herein, the term “differential expression” refers to an upregulation of one or more selected genes in comparison to the reference or control; a downregulation of one or more selected genes in comparison to the reference or control; or a combination of certain upregulated genes and down regulated genes.

[0057] As used herein, the term “microarray” refers to an ordered arrangement of hybridizable array elements, such as polynucleotide, oligonucleotide, or polypeptide probes, on a substrate.

[0058] As used herein, the term “polynucleotide,” whether used in singular or plural form, generally refers to any polyribonucleotide or polydeoxyribonucleotide, which can be unmodified RNA or DNA or modified RNA or DNA. Thus, for instance, polynucleotides as defined herein include, without limitation, single- and double-stranded DNA, DNA including single- and double-stranded regions, single- and double-stranded RNA, and RNA including single- and double-stranded regions, hybrid molecules comprising DNA and RNA that can be single-stranded or, more typically, double-stranded or include single- and double-stranded regions. In an aspect, the term “polynucleotide” refers to triple-stranded regions comprising RNA or DNA or both RNA and DNA. The strands in such regions can be from the same molecule or from different molecules. The regions can include all of one or more of the molecules, but more typically involve only a region of some of the molecules. One of the molecules of a triple-helical region often is an oligonucleotide. In an aspect, the term “polynucleotide” specifically includes cDNAs. In an aspect, the term “polynucleotide” includes DNAs (including cDNAs) and RNAs that contain one or more modified bases. DNA molecules comprise the nucleotide bases adenine (A), guanine (G), thymine (T), cytosine (C). Uracil (U) replaces thymine in RNA molecules. The symbol “N” can be used to represent any nucleotide base (e.g., A, G, C, T, or U). In an aspect, DNAs or RNAs with backbones modified for stability or for other reasons are “polynucleotides” as that term is intended herein. In an aspect, DNAs or RNAs comprising unusual bases, such as inosine, or modified bases, such as tritiated bases, are included within the term “polynucleotides” as defined herein. In general, the term “polynucleotide” embraces all chemically, enzymatically and/or metabolically modified forms of unmodified polynucleotides, as well as the chemical forms of DNA and RNA characteristic of viruses and cells, including simple and complex cells.

[0059] As used herein, the term “oligonucleotide” refers to a relatively short polynucleotide, including, without limitation, single-stranded deoxyribonucleotides, single- or double-stranded ribonucleotides, RNA:DNA hybrids and double-stranded DNAs. In an aspect, oligonucleotides, such as single-stranded DNA probe oligonucleotides, are synthesized by chemical methods, for example using automated oligonucleotide synthesizers that are commercially available. In an aspect, oligonucleotides is made by a variety of other methods, including in vitro recombinant DNA-mediated techniques and by expression of DNAs in cells and organisms.

[0060] As used herein, the terms “polypeptide”, “peptide” and “protein” are used interchangeably to refer to a polymer of amino acid residues. Polypeptides can be purified from natural sources (e.g., a biological sample) by known methods such as DEAE ion exchange, gel filtration, and hydroxyapatite chromatography. A polypeptide also can be purified, for example, by expressing a nucleic acid in an expression vector. In addition, a purified polypeptide can be obtained by chemical synthesis. The extent of purity of a polypeptide can be measured using any appropriate method, e.g., column chromatography, polyacrylamide gel electrophoresis, or HPLC analysis.

[0061] As used herein, “encoding” refers to a polynucleotide encoding for the amino acids of a polypeptide or a non-coding RNA molecule. A series of three nucleotide bases encodes one amino acid.

[0062] As used herein, the terms “differentially expressed gene,” “differential gene expression” and their synonyms, which are used interchangeably, refer to a gene whose expression is activated to a higher or lower level in a subject suffering from a disease, specifically cancer, such as lung cancer, relative to its expression in a control subject, such as a subject having a benign nodule. In an aspect, the terms also include genes whose expression is activated to a higher or lower level at different stages of the same disease. It is also understood that a differentially expressed gene can be either activated or inhibited at the nucleic acid level or protein level, or can be subject to alternative splicing to result in a different polypeptide product. Such differences can be evidenced by a change in mRNA levels, surface expression, secretion or other partitioning of a polypeptide, for example.

[0063] As used herein, the term “sequence identity” or “identity” in the context of two polynucleotides or polypeptide sequences makes reference to the residues in the two sequences that are the same when aligned for maximum correspondence over a specified comparison window. When percentage of sequence identity is used in reference to proteins it is recognized that residue positions which are not identical often differ by conservative amino acid substitutions, where amino acid residues are substituted for other amino acid residues with similar chemical properties (e.g., charge or hydrophobicity) and therefore do not change the functional properties of the molecule. When sequences differ in conservative substitutions, the percent sequence identity can be adjusted upwards to correct for the conservative nature of the substitution. Sequences that differ by such conservative substitutions are deemed to have “sequence similarity” or “similarity.”

[0064] Detection of Biomarkers

[0065] In an aspect, a biological sample obtained from a subject is whole blood. In one aspect, a biological sample is selected from the group consisting of peripheral blood mononuclear cells, plasma, saliva, urine, synovial fluid, bone marrow, cerebrospinal fluid, vaginal mucus, cervical mucus, nasal secretions, sputum, semen, amniotic fluid, bronchoscopy sample, bronchoalveolar lavage fluid, and other cellular exudates from a patient having cancer. In an aspect, a biological sample can be diluted with saline, buffer, or a physiologically acceptable diluent. In one aspect, a biological sample can be concentrated by lyophilization, vacuum evaporation, or nitrogen blow-down evaporation.

[0066] In an aspect, biomarkers of the present disclosure can be detected in the circulation (whole blood, serum, or plasma) or excretions or secretions (stool, urine, sputum, or nipple discharge), and thus easily assessed non-invasively and serially, or can be tissue-derived, and require either biopsy or special imaging for evaluation. In an aspect, biomarkers are genetic biomarkers that can be inherited. In an aspect, genetic biomarkers are detected as sequence variations in germ line DNA isolated from whole blood, sputum, or buccal cells, or can be somatic, and identified as mutations in DNA derived from tumor tissue.

[0067] In an aspect, a biomarker of the present disclosure is selected from the biomarkers in Table 1.

TABLE 1
Biomarkers used in a gene expression classifier for lung cancer

| | | | Full Length | Full Length |
|---|---|---|---|---|
| | | Biomarker | Nucleic Acid | Polypeptide |
| Biomarker | Description | SEQ ID NO | SEQ ID NO | SEQ ID NO |
| ABCC13 | ATP-binding cassette | 1 | 2 | 3 |
| | transporters | | | |
| ADCK3 | an atypical kinase thought to | 4 | 5 | 6 |
| | play a regulatory role in | | | |
| | coenzyme Q10 biosynthesis | | | |
| AMD1 | adenosylimethionine | 7 | 8 | 9 |
| | decarboxylase 1 | | | |
| CIR1 | Corepressor interacting with | 10 | 11 | 12 |
| | RBPJ 1 | | | |
| CLK3 | serine/threonine type protein | 13 | 14 | 15 |
| | kinase with a non-conserved N- | | | |
| | terminal domain | | | |
| DNAJB1 | DnaJ homolog subfamily B | 16 | 17 | 18 |
| | member 1 | | | |
| EPHX2 | soluble epoxide hydrolase | 19 | 20 | 21 |
| GALNT14 | polypeptide N- | 22 | 23 | 24 |
| | acetylgalactosaminyltransferase 14 | | | |
| GNAI2 | guanine nucleotide-binding | 25 | 26 | 27 |
| | protein G(i), alpha-2 subunit | | | |
| GSR | glutathione reductase, also | 28 | 29 | 30 |
| | known as glutathione-disulfide | | | |
| | reductase | | | |
| IFI27 | interferon alpha-inducible | 31 | 32 | 33 |
| | protein 27 | | | |
| INO80C | INO80 complex subunit C | 34 | 35 | 36 |
| LGR6 | leucine-rich repeat-containing | 37 | 38 | 39 |
| | G-protein coupled receptor 6 | | | |
| PDCD6IP | programmed cell death 6- | 40 | 41 | 42 |
| | interacting protein | | | |
| PSMB4 | 20S proteasome subunit beta-7 | 43 | 44 | 45 |
| | protein | | | |
| SCAF4 | arginine/serine-rich splicing | 46 | 47 | 48 |
| | factor family protein. | | | |
| SNRPD3 | small nuclear ribonucleoprotein | 49 | 50 | 51 |
| | Sm D3 | | | |
| STAMBP | STAM-binding protein | 52 | 53 | 54 |
| TMEM8A | Transmembrane protein 8A | 55 | 56 | 57 |
| UBAP2 | Ubiquitin-associated protein 2 | 58 | 59 | 60 |
| VNN1 | Pantetheinase | 61 | 62 | 63 |
| VPS29 | vacuolar protein sorting protein | 64 | 65 | 66 |
| ZER1 | a subunit of an E3 ubiquitin | 67 | 68 | 69 |
| | ligase complex | | | |

[0068] In an aspect, a gene expression classifier, or a gene panel, comprises all 23 biomarkers in Table 1. In an aspect, a gene expression classifier comprises a biomarker selected from the biomarkers in Table 1. In an aspect, a gene expression classifier comprises at least 5, at least 10, at least 15, or at least 20 biomarkers selected from the biomarkers in Table 1.

[0069] In an aspect, a gene expression classifier comprises ABCC13. In an aspect, a gene expression classifier comprises ABCC13 and at least 1, at least 5, at least 10, at least 15, or at least 20 biomarkers selected from the biomarkers in Table 1.

[0070] In an aspect, a gene expression classifier comprises ADCK3. In an aspect, a gene expression classifier comprises ADCK3 and at least 1, at least 5, at least 10, at least 15, or at least 20 biomarkers selected from the biomarkers in Table 1.

[0071] In an aspect, a gene expression classifier comprises GALNT14. In an aspect, a gene expression classifier comprises GALNT14 and at least 1, at least 5, at least 10, at least 15, or at least 20 biomarkers selected from the biomarkers in Table 1.

[0072] In an aspect, a gene expression classifier comprises GNAI2. In an aspect, a gene expression classifier comprises GNAI2 and at least 1, at least 5, at least 10, at least 15, or at least 20 biomarkers selected from the biomarkers in Table 1.

[0073] In an aspect, a gene expression classifier comprises ZER1. In an aspect, a gene expression classifier comprises ZER1 and at least 1, at least 5, at least 10, at least 15, or at least 20 biomarkers selected from the biomarkers in Table 1.

[0074] In an aspect, a biomarker of the present disclosure is selected from the biomarkers in Table 1 and Table 2.

TABLE 2
Additional biomarkers used in a gene expression classifier for lung cancer

| | | | Full Length | Full Length |
|---|---|---|---|---|
| | | Biomarker | Nucleic Acid | Polypeptide |
| Biomarker | Description | SEQ ID NO | SEQ ID NO | SEQ ID NO |
| ANKHD1 | Ankyrin Repeat And KH | 70 | 71 | 72 |
| | Domain-Containing Protein 1 | | | |
| CLCN4 | Chloride Voltage-Gated | 73 | 74 | 75 |
| | Channel 4 | | | |
| CTSH | Cathepsin H | 76 | 77 | 78 |
| HDAC3 | Histone Deacetylase 3 | 79 | 80 | 81 |
| ITPR1 | Inositol 1,4,5-Trisphosphate | 82 | 83 | 84 |
| | Receptor Type 1 | | | |
| LILRA5 | Leukocyte Immunoglobulin | 85 | 86 | 87 |
| | Like Receptor A5 | | | |
| PNPLA6 | Patatin-Like Phospholipase | 88 | 89 | 90 |
| | Domain-Containing Protein 6 | | | |
| PPM1M | Protein Phosphatase, | 91 | 92 | 93 |
| | Mg2+/Mn2+ Dependent 1M | | | |
| PUM1 | Pumilio RNA Binding Family | 94 | 95 | 96 |
| | Member 1 | | | |
| RBPMS2 | RNA Binding Protein, MRNA | 97 | 98 | 99 |
| | Processing Factor 2 | | | |
| SLC25A20 | Solute Carrier Family 25 | 100 | 101 | 102 |
| | Member 20 | | | |
| TPR | Translocated Promoter Region, | 103 | 104 | 105 |
| | Nuclear Basket Protein | | | |
| WDFY3 | WD Repeat And FYVE | 106 | 107 | 108 |
| | Domain Containing Protein 3 | | | |

[0075] In an aspect, a gene expression classifier, or a gene panel, comprises all 13 biomarkers in Table 2. In an aspect, a gene expression classifier comprises all 36 biomarkers in Table 1 and Table 2. In an aspect, a gene expression classifier comprises a biomarker selected from the biomarkers in Table 2. In an aspect, a gene expression classifier comprises at least 5 or at least 10 biomarkers selected from the biomarkers in Table 2. In an aspect, a gene expression classifier comprises at least 5, at least 10, at least 15, at least 20, at least 25, at least 30, or at least 35 biomarkers selected from the 36 biomarkers in Table 1 and Table 2.

[0076] In an aspect, a gene expression classifier comprises ABCC13. In an aspect, a gene expression classifier comprises ABCC13 and at least 1, at least 5, at least 10, at least 15, at least 20, at least 25, at least 30, or at least 35 biomarkers selected from the 36 biomarkers in Table 1 and Table 2. In an aspect, a gene expression classifier comprises ABCC13 and a biomarker selected from the group consisting of ADCK3, GALNT14, GNAI2, PPM1M, and ZER1. In an aspect, a gene expression classifier comprises ABCC13 and two biomarkers selected from the group consisting of ADCK3, GALNT14, GNAI2, PPM1M, and ZER1. In an aspect, a gene expression classifier comprises ABCC13 and three biomarkers selected from the group consisting of ADCK3, GALNT14, GNAI2, PPM1M, and ZER1. In an aspect, a gene expression classifier comprises ABCC13 and four biomarkers selected from the group consisting of ADCK3, GALNT14, GNAI2, PPM1M, and ZER1.

[0077] In an aspect, a gene expression classifier comprises ADCK3. In an aspect, a gene expression classifier comprises ADCK3 and at least 1, at least 5, at least 10, at least 15, at least 20, at least 25, at least 30, or at least 35 biomarkers selected from the 36 biomarkers in Table 1 and Table 2. In an aspect, a gene expression classifier comprises ADCK3 and a biomarker selected from the group consisting of ABCC13, GALNT14, GNAI2, PPM1M, and ZER1. In an aspect, a gene expression classifier comprises ADCK3 and two biomarkers selected from the group consisting of ABCC13, GALNT14, GNAI2, PPM1M, and ZER1. In an aspect, a gene expression classifier comprises ADCK3 and three biomarkers selected from the group consisting of ABCC13, GALNT14, GNAI2, PPM1M, and ZER1. In an aspect, a gene expression classifier comprises ADCK3 and four biomarkers selected from the group consisting of ABCC13, GALNT14, GNAI2, PPM1M, and ZER1.

[0078] In an aspect, a gene expression classifier comprises GALNT14. In an aspect, a gene expression classifier comprises GALNT14 and at least 1, at least 5, at least 10, at least 15, at least 20, at least 25, at least 30, or at least 35 biomarkers selected from the 36 biomarkers in Table 1 and Table 2. In an aspect, a gene expression classifier comprises GALNT14 and a biomarker selected from the group consisting of ABCC13, ADCK3, GNAI2, PPM1M, and ZER1. In an aspect, a gene expression classifier comprises GALNT14 and two biomarkers selected from the group consisting of ABCC13, ADCK3, GNAI2, PPM1M, and ZER1. In an aspect, a gene expression classifier comprises GALNT14 and three biomarkers selected from the group consisting of ABCC13, ADCK3, GNAI2, PPM1M, and ZER1. In an aspect, a gene expression classifier comprises GALNT14 and four biomarkers selected from the group consisting of ABCC13, ADCK3, GNAI2, PPM1M, and ZER1.

[0079] In an aspect, a gene expression classifier comprises GNAI2. In an aspect, a gene expression classifier comprises GNAI2 and at least 1, at least 5, at least 10, at least 15, at least 20, at least 25, at least 30, or at least 35 biomarkers selected from the 36 biomarkers in Table 1 and Table 2. In an aspect, a gene expression classifier comprises GNAI2 and a biomarker selected from the group consisting of ABCC13, ADCK3, GALNT14, PPM1M, and ZER1. In an aspect, a gene expression classifier comprises GNAI2 and two biomarkers selected from the group consisting of ABCC13, ADCK3, GALNT14, PPM1M, and ZER1. In an aspect, a gene expression classifier comprises GNAI2 and three biomarkers selected from the group consisting of ABCC13, ADCK3, GALNT14, PPM1M, and ZER1. In an aspect, a gene expression classifier comprises GNAI2 and four biomarkers selected from the group consisting of ABCC13, ADCK3, GALNT14, PPM1M, and ZER1.

[0080] In an aspect, a gene expression classifier comprises PPM1M. In an aspect, a gene expression classifier comprises PPM1M and at least 1, at least 5, at least 10, at least 15, at least 20, at least 25, at least 30, or at least 35 biomarkers selected from the 36 biomarkers in Table 1 and Table 2. In an aspect, a gene expression classifier comprises PPM1M and a biomarker selected from the group consisting of ABCC13, ADCK3, GALNT14, GNAI2, and ZER1. In an aspect, a gene expression classifier comprises PPM1M and two biomarkers selected from the group consisting of ABCC13, ADCK3, GALNT14, GNAI2, and ZER1. In an aspect, a gene expression classifier comprises PPM1M and three biomarkers selected from the group consisting of ABCC13, ADCK3, GALNT14, GNAI2, and ZER1. In an aspect, a gene expression classifier comprises PPM1M and four biomarkers selected from the group consisting of ABCC13, ADCK3, GALNT14, GNAI2, and ZER1.

[0081] In an aspect, a gene expression classifier comprises ZER1. In an aspect, a gene expression classifier comprises ZER1 and at least 1, at least 5, at least 10, at least 15, at least 20, at least 25, at least 30, or at least 35 biomarkers selected from the 36 biomarkers in Table 1 and Table 2. In an aspect, a gene expression classifier comprises ZER1 and a biomarker selected from the group consisting of ABCC13, ADCK3, GALNT14, GNAI2, and PPM1M. In an aspect, a gene expression classifier comprises ZER1 and two biomarkers selected from the group consisting of ABCC13, ADCK3, GALNT14, GNAI2, and PPM1M. In an aspect, a gene expression classifier comprises ZER1 and three biomarkers selected from the group consisting of ABCC13, ADCK3, GALNT14, GNAI2, and PPM1M. In an aspect, a gene expression classifier comprises ZER1 and four biomarkers selected from the group consisting of ABCC13, ADCK3, GALNT14, GNAI2, and PPM1M.

[0082] In an aspect, a gene expression classifier comprises one or more biomarkers selected from the group consisting of ABCC13, ADCK3, GALNT14, GNAI2, PPM1M, and ZER1; and one or more biomarkers selected from the group consisting of AMD1, CLCN4, PDCD6IP, PUM1, RBPMS2, and UBAP2.

[0083] In an aspect, a biomarker of the present disclosure is selected from the biomarkers in Table 1, Table 2, and Table 3.

TABLE 3
Additional biomarkers used in a gene expression classifier for lung cancer

| | | | Full Length | Full Length |
|---|---|---|---|---|
| | | Biomarker | Nucleic Acid | Polypeptide |
| Biomarker | Description | SEQ ID NO | SEQ ID NO | SEQ ID NO |
| ACHE | Acetylcholinesterase | 109 | 110 | 111 |
| | (Cartwright Blood Group) | | | |
| ACP1 | Acid Phosphatase 1 | 112 | 113 | 114 |
| AHCYL1 | Inositol 1,4,5-Trisphosphate | 115 | 116 | 117 |
| | Receptor-Binding Protein | | | |
| AKR1C1 | Aldo-Keto Reductase Family 1 | 118 | 119 | 120 |
| | Member C1 | | | |
| APOL1 | Apolipoprotein L1 | 121 | 122 | 123 |
| APOL3 | Apolipoprotein L3 | 124 | 125 | 126 |
| ARCN1 | Coatomer Protein Complex, | 127 | 128 | 129 |
| | Subunit Delta | | | |
| ARHGAP25 | Rho GTPase Activating | 130 | 131 | 132 |
| | Protein 25 | | | |
| ARHGEF3 | Rho Guanine Nucleotide | 133 | 134 | 135 |
| | Exchange Factor 3 | | | |
| ARPC2 | Actin Related Protein 2/3 | 136 | 137 | 138 |
| | Complex Subunit 2 | | | |
| ATXN2L | Ataxin-2-Like Protein | 139 | 140 | 141 |
| BCAT1 | Branched Chain Amino Acid | 142 | 143 | 144 |
| | Transaminase 1 | | | |
| BCL9L | B-Cell Lymphoma 9-Like | 145 | 146 | 147 |
| | Protein | | | |
| BTG1 | BTG Anti-Proliferation Factor | 148 | 149 | 150 |
| | 1 | | | |
| C1orf123/ | Chromosome 1 Open Reading | 151 | 152 | 153 |
| CZIB | Frame 23 | | | |
| C1orf43 | Chromosome 1 Open Reading | 154 | 155 | 156 |
| | Frame 43 | | | |
| CD177 | CD177 Molecule | 157 | 158 | 159 |
| CD300LD | CD300 Molecule Like Family | 160 | 161 | 162 |
| | Member D | | | |
| CDC42EP2 | CDC42 Effector Protein 2 | 163 | 164 | 165 |
| CEACAM3 | Carcinoembryonic Antigen | 166 | 167 | 168 |
| | Related Cell Adhesion | | | |
| | Molecule 3 | | | |
| CHMP2A | Charged Multivesicular Body | 169 | 170 | 171 |
| | Protein 2A | | | |
| CHST11 | Carbohydrate Sulfotransferase | 172 | 173 | 174 |
| | 11 | | | |
| CMBL | Carboxymethylenebutenolidase | 175 | 176 | 177 |
| | Homolog | | | |
| CRAT | Carnitine O-Acetyltransferase | 178 | 179 | 180 |
| CRIP2 | Cysteine Rich Protein 2 | 181 | 182 | 183 |
| CXCL1 | C—X—C Motif Chemokine | 184 | 185 | 186 |
| | Ligand 1 | | | |
| CXCR2P1 | C—X—C Motif Chemokine | 187 | 188 | non-coding |
| | Receptor 2 Pseudogene 1 | | | |
| DCTN4 | Dynactin Subunit 4 | 190 | 191 | 192 |
| DDX11L2 | DEAD/H-Box Helicase 11 | 193 | 194 | 195 |
| | Like 2 | | | |
| DDX11L9 | DEAD/H-Box Helicase 11 | 196 | 197 | non-coding |
| | Like 9 | | | |
| DHRS4 | Dehydrogenase/Reductase 4 | 199 | 200 | 201 |
| DHX16 | DEAH-Box Helicase 16 | 202 | 203 | 204 |
| DHX8 | DEAH-Box Helicase 8 | 205 | 206 | 207 |
| EDAR | Ectodysplasin A Receptor | 208 | 209 | 210 |
| EIF1AY | Eukaryotic Translation | 211 | 212 | 213 |
| | Initiation Factor 1A Y-Linked | | | |
| EIF2B1 | Eukaryotic Translation | 214 | 215 | 216 |
| | Initiation Factor 2B Subunit | | | |
| | Alpha | | | |
| EIF3C | Eukaryotic Translation | 217 | 218 | 219 |
| | Initiation Factor 3 Subunit C | | | |
| ELF3 | E74 Like ETS Transcription | 220 | 221 | 222 |
| | Factor 3 | | | |
| EMC7 | ER Membrane Protein | 223 | 224 | 225 |
| | Complex Subunit 7 | | | |
| EWSR1 | EWS RNA Binding Protein 1 | 226 | 227 | 228 |
| FAIM3/ | Fas Apoptotic Inhibitory | 229 | 230 | 231 |
| FCMR | Molecule 3 | | | |
| FAM105B/ | Ubiquitin Thioesterase Otulin | 232 | 233 | 234 |
| OTULIN | | | | |
| FAM193A | Family With Sequence | 235 | 236 | 237 |
| | Similarity 193 Member A | | | |
| FAM26F/ | Calcium Homeostasis | 238 | 239 | 240 |
| CALHM6 | Modulator Family Member 6 | | | |
| FAM86HP | Family With Sequence | 241 | 242 | non-coding |
| | Similarity 86 Member H, | | | |
| | Pseudogene | | | |
| FAS | Fas Cell Surface Death | 244 | 245 | 246 |
| | Receptor | | | |
| FBXW2 | F-Box And WD-40 Domain- | 247 | 248 | 249 |
| | Containing Protein 2 | | | |
| FCRL6 | Fc Receptor-Like Protein 6 | 250 | 251 | 252 |
| FGFBP2 | Fibroblast Growth Factor | 253 | 254 | 255 |
| | Binding Protein 2 | | | |
| FMNL1 | Formin-Like Protein 1 | 256 | 257 | 258 |
| FMNL3 | Formin-Like Protein 3 | 259 | 260 | 261 |
| FRG1B/ | FSHD Region Gene 1 Family | 262 | 263 | non-coding |
| FRG1BP | Member B, Pseudogene | | | |
| G0S2 | G0/G1 Switch 2 | 265 | 266 | 267 |
| GADD45A | Growth Arrest And DNA | 268 | 269 | 270 |
| | Damage Inducible Alpha | | | |
| GNA12 | G Protein Subunit Alpha 12 | 271 | 272 | 273 |
| GPR56 | Adhesion G Protein-Coupled | 274 | 275 | 276 |
| | Receptor G1 | | | |
| TPX2 | Microtubule Nucleation Factor | 277 | 278 | 279 |
| GUSBP5 | GUSB Pseudogene 5 | 280 | 281 | non-coding |
| GZMB | Granzyme B | 283 | 284 | 285 |
| GZMH | Granzyme H | 286 | 287 | 288 |
| HEMGN | Hemogen | 289 | 290 | 291 |
| HIST1H3D | Histone Cluster 1 H3 Family | 292 | 293 | 294 |
| | Member D | | | |
| HMBS | Hydroxymethylbilane Synthase | 295 | 296 | 297 |
| HP | Haptoglobin | 298 | 299 | 300 |
| HSPA6 | Heat Shock Protein Family A | 301 | 302 | 303 |
| | (Hsp70) Member 6 | | | |
| HSPA7 | Heat Shock Protein Family A | 304 | 305 | non-coding |
| | (Hsp70) Member 7 | | | |
| IL9R | Interleukin 9 Receptor | 307 | 308 | 309 |
| INSL3 | Leydig Insulin-Like Peptide | 310 | 311 | 312 |
| IRAK3 | Interleukin 1 Receptor | 313 | 314 | 315 |
| | Associated Kinase 3 | | | |
| ITGB3 | Integrin Subunit Beta 3 | 316 | 317 | 318 |
| KCNJ15 | Potassium Voltage-Gated | 319 | 320 | 321 |
| | Channel Subfamily J Member | | | |
| | 15 | | | |
| KDM5D | Lysine Demethylase 5D | 322 | 323 | 324 |
| KIAA0317/ | Apoptosis Resistant E3 | 325 | 326 | 327 |
| AREL1 | Ubiquitin Protein Ligase 1 | | | |
| LAP3 | Leucine Aminopeptidase 3 | 328 | 329 | 330 |
| LPAR1 | Lysophosphatidic Acid | 331 | 332 | 333 |
| | Receptor 1 | | | |
| LRBA | LPS Responsive Beige-Like | 334 | 335 | 336 |
| | Anchor Protein | | | |
| LRP1 | LDL Receptor Related Protein | 337 | 338 | 339 |
| | 1 | | | |
| MATK | Megakaryocyte-Associated | 340 | 341 | 342 |
| | Tyrosine Kinase | | | |
| MAX | MYC Associated Factor X | 343 | 344 | 345 |
| MPL | MPL Proto-Oncogene, | 346 | 347 | 348 |
| | Thrombopoietin Receptor | | | |
| MTCH1 | Mitochondrial Carrier 1 | 349 | 350 | 351 |
| NAIP | NLR Family Apoptosis | 352 | 353 | 354 |
| | Inhibitory Protein | | | |
| ORM1 | Orosomucoid 1 | 355 | 356 | 357 |
| ORM2 | Orosomucoid 2 | 358 | 359 | 360 |
| PDE3A | Phosphodiesterase 3A | 361 | 362 | 363 |
| PI3 | Peptidase Inhibitor 3 | 364 | 365 | 366 |
| PLK1 | Polo Like Kinase 1 | 367 | 368 | 369 |
| PPP1CB | Protein Phosphatase 1 | 370 | 371 | 372 |
| | Catalytic Subunit Beta | | | |
| PPP1R13L | Protein Phosphatase 1 | 373 | 374 | 375 |
| | Regulatory Subunit 13 Like | | | |
| PRKY | Protein Kinase Y-Linked | 376 | 377 | non-coding |
| | (Pseudogene) | | | |
| PRR12 | Proline Rich 12 | 379 | 380 | 381 |
| PSMB2 | Proteasome Subunit Beta 2 | 382 | 383 | 384 |
| PSMC1 | Proteasome 26S Subunit, | 385 | 386 | 387 |
| | ATPase 1 | | | |
| PTGS2 | Prostaglandin-Endoperoxide | 388 | 389 | 390 |
| | Synthase 2 | | | |
| QPCT | Glutaminyl-Peptide | 391 | 392 | 393 |
| | Cyclotransferase | | | |
| RAB7A | RAB7A, Member RAS | 394 | 395 | 396 |
| | Oncogene Family | | | |
| REEP5 | Receptor Accessory Protein 5 | 397 | 398 | 399 |
| RNF11 | Ring Finger Protein 11 | 400 | 401 | 402 |
| RNF114 | Ring Finger Protein 114 | 403 | 404 | 405 |
| RNF14 | Ring Finger Protein 14 | 406 | 407 | 408 |
| RPS4Y1 | Ribosomal Protein S4 Y- | 409 | 410 | 411 |
| | Linked 1 | | | |
| RRBP1 | Ribosome Binding Protein 1 | 412 | 413 | 414 |
| RRN3P3 | RRN3 Homolog, RNA | 415 | 416 | non-coding |
| | Polymerase 1 Transcription | | | |
| | Factor Pseudogene 3 | | | |
| S100B | S100 Calcium Binding Protein | 418 | 419 | 420 |
| | B | | | |
| SAMD3 | Sterile Alpha Motif Domain- | 421 | 422 | 423 |
| | Containing Protein 3 | | | |
| SATB1 | SATB Homeobox 1 | 424 | 425 | 426 |
| SCGB3A1 | Secretoglobin Family 3A | 427 | 428 | 429 |
| | Member 1 | | | |
| SLC14A1 | Solute Carrier Family 14 | 430 | 431 | 432 |
| | Member 1 (Kidd Blood Group) | | | |
| SLC22A18AS | Solute Carrier Family 22 | 433 | 434 | 435 |
| | Member 18 Antisense | | | |
| SLC6A8 | Solute Carrier Family 6 | 436 | 437 | 438 |
| | Member 8 | | | |
| SMARCC1 | SWI/SNF Related, Matrix | 439 | 440 | 441 |
| | Associated, Actin Dependent | | | |
| | Regulator Of Chromatin | | | |
| | Subfamily C Member 1 | | | |
| SPDYC | Speedy/RINGO Cell Cycle | 442 | 443 | 444 |
| | Regulator Family Member C | | | |
| SSBP3 | Single Stranded DNA Binding | 445 | 446 | 447 |
| | Protein 3 | | | |
| ST6GAL1 | ST6 Beta-Galactoside Alpha- | 448 | 449 | 450 |
| | 2,6-Sialyltransferase 1 | | | |
| STK17B | Serine/Threonine Kinase 17b | 451 | 452 | 453 |
| SUPT5H | SPT5 Homolog, DSIF | 454 | 455 | 456 |
| | Elongation Factor Subunit | | | |
| TAS2R43 | Taste 2 Receptor Member 43 | 457 | 458 | 459 |
| TBP | TATA-Box Binding Protein | 460 | 461 | 462 |
| TDRD9 | Tudor Domain Containing 9 | 463 | 464 | 465 |
| TGFBR3 | Transforming Growth Factor | 466 | 467 | 468 |
| | Beta Receptor 3 | | | |
| THBS1 | Thrombospondin 1 | 469 | 470 | 471 |
| TLR2 | Toll Like Receptor 2 | 472 | 473 | 474 |
| TMEM158 | Transmembrane Protein 158 | 475 | 476 | 477 |
| | (Gene/Pseudogene) | | | |
| TMOD1 | Tropomodulin 1 | 478 | 479 | 480 |
| TNS1 | Tensin 1 | 481 | 482 | 483 |
| TP63 | Tumor Protein P63 | 484 | 485 | 486 |
| TRIM27 | Tripartite Motif Containing 27 | 487 | 488 | 489 |
| TSPAN9 | Tetraspanin 9 | 490 | 491 | 492 |
| TTTY10 | Testis-Specific Transcript, Y- | 493 | 494 | non-coding |
| | Linked 10 | | | |
| TTTY15 | Testis-Specific Transcript, Y- | 496 | 497 | non-coding |
| | Linked 15 | | | |
| U2AF2 | U2 Small Nuclear RNA | 499 | 500 | 501 |
| | Auxiliary Factor 2 | | | |
| UPK3B | Uroplakin 3B | 502 | 503 | 504 |
| USP32P2 | Ubiquitin Specific Peptidase | 505 | 506 | non-coding |
| | 32 Pseudogene 2 | | | |
| USP9Y | Ubiquitin Specific Peptidase 9 | 508 | 509 | 510 |
| | Y-Linked | | | |
| XIST | X Inactive Specific Transcript | 511 | 512 | non-coding |
| XK | X-Linked Kx Blood Group | 514 | 515 | 516 |
| XPO7 | Exportin 7 | 517 | 518 | 519 |
| XRCC2 | X-Ray Repair Cross | 520 | 521 | 522 |
| | Complementing 2 | | | |
| YOD1 | YOD1 Deubiquitinase | 523 | 524 | 525 |
| ZFY | Zinc Finger Protein Y-Linked | 526 | 527 | 528 |
| ZNF143 | Zinc Finger Protein 143 | 529 | 530 | 531 |
| ZNF541 | Zinc Finger Protein 541 | 532 | 533 | 534 |
| ZNF831 | Zinc Finger Protein 831 | 535 | 536 | 537 |

[0084] In an aspect, a gene expression classifier comprises all 179 biomarkers in Table 1, Table 2, and Table 3. In an aspect, a gene expression classifier comprises a biomarker selected from the 143 biomarkers in Table 3. In an aspect, a gene expression classifier comprises a biomarker selected from the 36 biomarkers in Table 1 and Table 2; and a biomarker selected from the 143 biomarkers in Table 3. In an aspect, a gene expression classifier comprises at least 5, at least 10, at least 15, at least 20, at least 25, at least 30, at least 35, at least 40, at least 45, at least 50, at least 55, at least 60, at least 65, at least 70, at least 75, at least 80, at least 85, at least 90, at least 95, at least 100, at least 105, at least 110, at least 115, at least 120, at least 125, at least 130, at least 135, at least 140, at least 145, at least 150, at least 155, at least 160, at least 165, at least 170, or at least 175 biomarkers selected from the 179 biomarkers in Table 1, Table 2, and Table 3.

[0085] In an aspect, a gene expression classifier comprises ABCC13 and at least 1, at least 5, at least 10, at least 15, at least 20, at least 25, at least 30, at least 35, at least 40, at least 45, at least 50, at least 55, at least 60, at least 65, at least 70, at least 75, at least 80, at least 85, at least 90, at least 95, at least 100, at least 105, at least 110, at least 115, at least 120, at least 125, at least 130, at least 135, at least 140, at least 145, at least 150, at least 155, at least 160, at least 165, at least 170, or at least 175 biomarkers selected from the 179 biomarkers in Table 1, Table 2, and Table 3.

[0086] In an aspect, a gene expression classifier comprises ADCK3 and at least 1, at least 5, at least 10, at least 15, at least 20, at least 25, at least 30, at least 35, at least 40, at least 45, at least 50, at least 55, at least 60, at least 65, at least 70, at least 75, at least 80, at least 85, at least 90, at least 95, at least 100, at least 105, at least 110, at least 115, at least 120, at least 125, at least 130, at least 135, at least 140, at least 145, at least 150, at least 155, at least 160, at least 165, at least 170, or at least 175 biomarkers selected from the 179 biomarkers in Table 1, Table 2, and Table 3.

[0087] In an aspect, a gene expression classifier comprises GALNT14 and at least 1, at least 5, at least 10, at least 15, at least 20, at least 25, at least 30, at least 35, at least 40, at least 45, at least 50, at least 55, at least 60, at least 65, at least 70, at least 75, at least 80, at least 85, at least 90, at least 95, at least 100, at least 105, at least 110, at least 115, at least 120, at least 125, at least 130, at least 135, at least 140, at least 145, at least 150, at least 155, at least 160, at least 165, at least 170, or at least 175 biomarkers selected from the 179 biomarkers in Table 1, Table 2, and Table 3.

[0088] In an aspect, a gene expression classifier comprises GNAI2 and at least 1, at least 5, at least 10, at least 15, at least 20, at least 25, at least 30, at least 35, at least 40, at least 45, at least 50, at least 55, at least 60, at least 65, at least 70, at least 75, at least 80, at least 85, at least 90, at least 95, at least 100, at least 105, at least 110, at least 115, at least 120, at least 125, at least 130, at least 135, at least 140, at least 145, at least 150, at least 155, at least 160, at least 165, at least 170, or at least 175 biomarkers selected from the 179 biomarkers in Table 1, Table 2, and Table 3.

[0089] In an aspect, a gene expression classifier comprises PPM1M and at least 1, at least 5, at least 10, at least 15, at least 20, at least 25, at least 30, at least 35, at least 40, at least 45, at least 50, at least 55, at least 60, at least 65, at least 70, at least 75, at least 80, at least 85, at least 90, at least 95, at least 100, at least 105, at least 110, at least 115, at least 120, at least 125, at least 130, at least 135, at least 140, at least 145, at least 150, at least 155, at least 160, at least 165, at least 170, or at least 175 biomarkers selected from the 179 biomarkers in Table 1, Table 2, and Table 3.

[0090] In an aspect, a gene expression classifier comprises ZER1 and at least 1, at least 5, at least 10, at least 15, at least 20, at least 25, at least 30, at least 35, at least 40, at least 45, at least 50, at least 55, at least 60, at least 65, at least 70, at least 75, at least 80, at least 85, at least 90, at least 95, at least 100, at least 105, at least 110, at least 115, at least 120, at least 125, at least 130, at least 135, at least 140, at least 145, at least 150, at least 155, at least 160, at least 165, at least 170, or at least 175 biomarkers selected from the 179 biomarkers in Table 1, Table 2, and Table 3.

[0091] In an aspect, a gene expression classifier comprises ABCC13, ADCK3, GALNT14, GNAI2, PPM1M, and ZER1. In an aspect, a gene expression classifier comprises ABCC13, ADCK3, GALNT14, GNAI2, PPM1M, ZER1, and at least 1, at least 5, at least 10, at least 15, at least 20, or at least 25 biomarkers selected from the 36 biomarkers in Table 1 and Table 2. In an aspect, a gene expression classifier comprises ABCC13, ADCK3, GALNT14, GNAI2, PPM1M, ZER1, and at least 1, at least 5, at least 10, at least 15, at least 20, at least 25, at least 30, at least 35, at least 40, at least 45, at least 50, at least 55, at least 60, at least 65, at least 70, at least 75, at least 80, at least 85, at least 90, at least 95, at least 100, at least 105, at least 110, at least 115, at least 120, at least 125, at least 130, at least 135, at least 140, at least 145, at least 150, at least 155, at least 160, at least 165, or at least 170 biomarkers selected from the 179 biomarkers in Table 1, Table 2, and Table 3.

[0092] In an aspect, the expression level of a biomarker in Table 1, Table 2, and Table 3 is detected using a nucleic acid probe that binds to a nucleic acid sequence having the corresponding full length nucleic acid sequence, or a portion thereof. In an aspect, the expression level of a biomarker in Table 1, Table 2, and Table 3 is detected using a nucleic acid probe that binds to a nucleic acid sequence having at least 80%, at least 85%, at least 90%, at least 93%, at least 95%, at least 98%, at least 99%, at least 99.5%, at least 99.8%, or at least 99.9% sequence identity to the corresponding full length nucleic acid sequence, or a portion thereof.

[0093] In an aspect, the expression level of a biomarker in Table 1, Table 2, and Table 3 is detected using an antibody, or a fragment thereof that binds to a protein having an amino acid sequence of the corresponding full length polypeptide sequence. In an aspect, the expression level of a biomarker in Table 1, Table 2, and Table 3 is detected using an antibody, or a fragment thereof that binds to a protein having an amino acid sequence that has at least 80%, at least 85%, at least 90%, at least 93%, at least 95%, at least 98%, at least 99%, at least 99.5%, at least 99.8%, or at least 99.9% sequence identity to the corresponding full length polypeptide sequence.

[0094] Comparison of Biomarkers

[0095] In one aspect, a control or reference level of a biomarker or a panel of biomarkers is obtained from a single subject. In an aspect, a control or reference level of a biomarker or a panel of biomarkers is obtained from a population of individuals sharing a specific characteristic. In an aspect, a control or reference level of a biomarker or a panel of biomarkers is an assigned value which correlates with the level of a specific control individual or population, although not necessarily measured at the time of assaying the test subject's sample. In an aspect, the control subject or reference of a biomarker or a panel of biomarkers is obtained from a patient (or population) having a non-cancerous nodule.

[0096] In one aspect, a control subject or reference is a patient (or population) having a cancerous tumor. In an aspect, a control subject is a subject or population with lung cancer, such as a subject who is a current or former smoker with malignant disease, a subject with a solid lung tumor prior to surgery for removal of same; a subject with a solid lung tumor following surgical removal of the tumor; a subject with a solid lung tumor prior to therapy for same; and a subject with a solid lung tumor during or following therapy for same. In an aspect, controls for purposes of the compositions and methods described herein include any of the following classes of reference human subject with no lung cancer, such as the classes of smoker with non-malignant disease, a former smoker with non-malignant disease (including patients with lung nodules), a non-smoker who has chronic obstructive pulmonary disease (COPD), and a former smoker with COPD. In an aspect, the control subject is a healthy non-smoker with no disease or a healthy smoker with no disease.

[0097] In an aspect, differential gene expression can include a comparison of expression between two or more genes or their gene products, or a comparison of the ratios of the expression between two or more genes or their gene products, or even a comparison of two differently processed products of the same gene, which differ between normal subjects, non-health controls and subjects suffering from a disease, specifically cancer, or between various stages of the same disease. In an aspect, differential expression includes both quantitative, as well as qualitative, differences in the temporal or cellular expression pattern in a gene or its expression products among, for example, normal and diseased cells, or among cells which have undergone different disease events or disease stages. In an aspect, differential gene expression is considered to be present when there is a statistically significant difference in gene expression between the subject and control samples.

[0098] Methods of Identifying Lung Cancer Risks

[0099] The present disclosure provides for, and includes, methods for detecting whether a subject is at risk of lung cancer based on a blood-based multivariate gene expression classifier. The present disclosure further provides for, and includes methods for determining whether to obtain a biopsy in a subject based on a blood-based multivariate gene expression classifier. The present disclosure also provides for, and includes, methods for treating lung cancer based on a blood-based multivariate gene expression classifier.

[0100] In an aspect, a method for detecting whether a subject is at risk of lung cancer is provided, the method comprising detecting a lung nodule in the subject, determining the size of the nodule, assigning the subject as being at high risk of lung cancer if the nodule size is larger than 3 cm; assigning the subject as being at low risk of lung cancer if the nodule size is less than 0.8 cm; obtaining or having obtained non-invasively a biological sample from the subject if the nodule size is 0.8 cm to 3.0 cm, detecting the expression levels of biomarkers of a gene expression classifier in the biological sample, comparing the expression levels to a reference, and flagging that the nodule is at high risk or low risk of lung cancer based on the comparing step. In an aspect, the method further comprises obtaining or having obtained a biopsy from the subject if the subject is determined to be at high risk of lung cancer. In an aspect, the method further comprises performing or having performed serial imaging of the subject if the subject is determined to be at low risk of lung cancer. In an aspect, the gene expression classifier is selected per paragraphs [0067]-[0094].

[0101] In an aspect, a method for determining whether a subject is at risk of lung cancer is provided, the method comprising obtaining or having obtained non-invasively a biological sample from the subject; detecting expression levels of biomarkers of a gene expression classifier in the biological sample; comparing the expression levels to a reference to determine if the subject is at risk of lung cancer; and providing a recommendation that the subject is at risk of lung cancer based on the comparing step. In an aspect, the gene expression classifier is selected per paragraphs [0067]-[0094].

[0102] In an aspect, a method for identifying a subject in need of a biopsy is provided, the method comprising obtaining or having obtained non-invasively a biological sample from the subject; detecting expression levels of biomarkers of a gene expression classifier in the biological sample; comparing the expression levels to a reference to determine if the subject is at risk of lung cancer; and obtaining or having obtained a biopsy from the subject to test for lung cancer if the subject is determined to be at risk of lung cancer based on the comparing step. In an aspect, the gene expression classifier is selected per paragraphs [0067]-[0094]. In an aspect, the method further comprises a step of administering or having administered a lung cancer therapy to the subject if the biopsy shows malignancy. In an aspect, the lung cancer therapy is selected from the group consisting of surgery, chemotherapy, radiation therapy, targeted therapy, and immunotherapy. In one aspect, lung cancer therapy is provided as chemotherapy after surgery. In an aspect, lung cancer therapy is provided as a neoadjuvant treatment, which is providing chemotherapy before radiation or surgery. In one aspect, a surgical treatment for lung cancer is video-assisted thoracoscopic surgery (VATS). In an aspect, chemotherapy is selected from a group consisting of cisplatin (Platinol) or carboplatin (Paraplatin) plus docetaxel (Taxotere), gemcitabine (Gemzar), paclitaxel (Taxol and others), vinorelbine (Navelbine and others), and pemetrexed (Alimta), or a combination thereof. In an aspect, targeted therapy is selected from the group consisting of Erlotinib (Tarceva and others), Afatinib (Gilortif), Gefitinib (Iressa), Bevacizumab (Avastin), Crizotinib (Xalkori), and Ceritinib (Zykadia). In one aspect, immunotherapy is selected from the group consisting of monoclonal antibodies, checkpoint inhibitors, therapeutic vaccines, and adoptive T-cell transfer.

[0103] In an aspect, a method for determining whether a subject having one or more lung nodules of the size 0.8 cm to 3.0 cm is at risk of lung cancer is provided, the method comprising obtaining or having obtained non-invasively a biological sample from the subject; detecting expression levels of biomarkers of a gene expression classifier in the biological sample; comparing the expression levels to a reference to determine if the subject is at risk of lung cancer; and flagging whether the subject is at risk of lung cancer based on the comparing step. In an aspect, the gene expression classifier is selected per paragraphs [0067]-[0094]. In an aspect, the expression levels determine whether the one or more lung nodules is malignant or benign. In an aspect, one or more lung nodules of the subject has a size of from 0.5 cm to 3.0 cm, such as from 0.8 cm to 3.0 cm, from 0.5 cm to 2.0 cm, or from 0.8 cm to 2.0 cm.

[0104] In an aspect, a method for treating a subject in need of lung cancer therapy is provided, the method comprising obtaining or having obtained non-invasively a biological sample from the subject; detecting expression levels of biomarkers of a gene expression classifier in the biological sample; comparing the expression levels to a reference to determine if the subject is at risk of lung cancer; and administering or having administered a lung cancer therapy if the subject is determined to be at risk of lung cancer based on the comparing step. In an aspect, the gene expression classifier is selected per paragraphs [0067]-[0094]. In an aspect, the lung cancer therapy is selected from the group consisting of surgery, chemotherapy, radiation therapy, targeted therapy, and immunotherapy. In one aspect, lung cancer therapy is provided as chemotherapy after surgery. In an aspect, lung cancer therapy is provided as a neoadjuvant treatment, which is providing chemotherapy before radiation or surgery. In one aspect, a surgical treatment for lung cancer is video-assisted thoracoscopic surgery (VATS). In an aspect, chemotherapy is selected from a group consisting of cisplatin (Platinol) or carboplatin (Paraplatin) plus docetaxel (Taxotere), gemcitabine (Gemzar), paclitaxel (Taxol and others), vinorelbine (Navelbine and others), and pemetrexed (Alimta), or a combination thereof. In an aspect, targeted therapy is selected from the group consisting of Erlotinib (Tarceva and others), Afatinib (Gilortif), Gefitinib (Iressa), Bevacizumab (Avastin), Crizotinib (Xalkori), and Ceritinib (Zykadia). In one aspect, immunotherapy is selected from the group consisting of monoclonal antibodies, checkpoint inhibitors, therapeutic vaccines, and adoptive T-cell transfer.

[0105] Kits for Identifying Lung Cancer Risks

[0106] The present disclosure provides for, and includes kits for detecting the expression levels of biomarkers for determining whether a subject is at risk of lung cancer. In an aspect, kits of the present disclosure are capable of detecting whether a lung nodule of the size 0.8 cm to 3 cm is malignant or benign.

[0107] In an aspect, a kit comprises a probe for detecting the expression levels of biomarkers of a gene expression classifier for determining whether a subject is at risk of lung cancer. In an aspect the gene expression classifier is selected per paragraphs [0067]-[0094].

[0108] In one aspect, a kit comprises at least 1, 5, 10, 15, 20, 25, 30, 35, 40, 45, 50, 55, 60, 65, 70, 75, 80, 85, 90, 95, 100, 105, 110, 115, 120, 125, 130, 135, 140, 145, 150, 155, 160, 165, 170, or 175 polynucleotides or oligonucleotides or ligands, wherein each polynucleotide or oligonucleotide or ligand hybridizes to a different gene, gene fragment, gene transcript or expression product in a sample selected from the genes of Table 1, Table 2, and Table 3. In an aspect, an oligonucleotide probe is a synthetic oligonucleotide probe. In one aspect, an oligonucleotide probe is partially complementary to a polynucleotide of interest and forms a duplex structure by hybridization with at least one strand of the polynucleotide of interest. In an aspect, an oligonucleotide probe is fully complementary to a polynucleotide of interest and forms a duplex structure by hybridization with at least one strand of the polynucleotide of interest. In one aspect, an oligonucleotide probe are from 10 to 50 nucleotides in length, such as from 10 to 45 nucleotides in length, from 10 to 40 nucleotides in length, from 10 to 35 nucleotides in length, from 10 to 30 nucleotides in length, from 10 to 25 nucleotides in length, from 10 to 20 nucleotides in length, from 10 to 15 nucleotides in length, from 15 to 50 nucleotides in length, from 15 to 45 nucleotides in length, from 15 to 40 nucleotides in length, from 15 to 35 nucleotides in length, from 15 to 30 nucleotides in length, from 15 to 25 nucleotides in length, from 15 to 20 nucleotides in length, from 20 to 50 nucleotides in length, from 20 to 45 nucleotides in length, from 20 to 40 nucleotides in length, from 20 to 35 nucleotides in length, from 20 to 30 nucleotides in length, from 20 to 25 nucleotides in length, from 25 to 50 nucleotides in length, from 25 to 45 nucleotides in length, from 25 to 40 nucleotides in length, from 25 to 35 nucleotides in length, from 25 to 30 nucleotides in length, from 30 to 50 nucleotides in length, from 30 to 45 nucleotides in length, from 30 to 40 nucleotides in length, from 30 to 35 nucleotides in length, from 35 to 50 nucleotides in length, from 35 to 45 nucleotides in length, from 35 to 40 nucleotides in length, from 40 to 50 nucleotides in length, from 40 to 45 nucleotides in length, or from 45 to 50 nucleotides in length. In an aspect, an oligonucleotide probe has a sequence of a biomarker, complement or fragment thereof, selected from the group of biomarkers listed in Table 1, Table 2, and Table 3. In one aspect, an oligonucleotide probe comprise a fragment of a biomarker selected from the group of biomarkers listed in Table 1, Table 2, and Table 3, or a complement thereof, where the fragment has a length of at least 10 nucleotides, such as at least 15 nucleotides, at least 20 nucleotides, at least 25 nucleotides, at least 30 nucleotides, at least 35 nucleotides, at least 40 nucleotides, at least 45 nucleotides, at least 50 nucleotides, at least 55 nucleotides, at least 60 nucleotides, at least 65 nucleotides, at least 70 nucleotides, at least 75 nucleotides, at least 80 nucleotides, at least 90 nucleotides, at least 95 nucleotides, or at least 100 nucleotides. In an aspect, a kit of the present disclosure can be used with the gene expression profiling methods which are known in the art. In one aspect, a kit can be adapted accordingly to suit the method for which they are intended to be used. In one aspect, at least one polynucleotide or oligonucleotide or ligand is attached to a detectable label. In an aspect, each polynucleotide or oligonucleotide is attached to a different detectable label, each capable of being detected independently.

[0109] In an aspect, a kit comprises a capture oligonucleotide or ligand, which hybridizes to at least one polynucleotide or oligonucleotide or ligand. In one aspect, a capture oligonucleotide or ligand can include a nucleic acid sequence which is specific for a portion of the oligonucleotide or polynucleotide or ligand which is specific for the gene of interest. In an aspect, a capture ligand can be a peptide or polypeptide which is specific for the ligand to the gene of interest. In one aspect, a capture ligand is an antibody, as in a sandwich ELISA.

[0110] In an aspect, a capture oligonucleotide also includes a moiety which allows for binding with a substrate. In one aspect, a substrate can be, without limitation, a plate, bead, slide, well, chip or chamber. In one aspect, a kit comprises a capture oligonucleotide for each different polynucleotide or oligonucleotide which is specific to a gene of interest. In an aspect, each capture oligonucleotide can contain the same moiety which allows for binding with the same substrate.

[0111] Detection of biomarkers of the present disclosure can be performed through any methodologies known to those having ordinary skill in the art. Examples of detection methodologies include, but are not limited to, Southern analysis, PCR amplification for detection of a polynucleotide, Northern blots, RNase protection, primer-extension, RT-PCR amplification for detecting RNA transcripts, Sanger sequencing, Next Generation sequencing technologies (e.g., Illumina, PacBio, Ion Torrent, 454), enzymatic assays for detecting enzyme or ribozyme activity of polypeptides and polynucleotides, and protein gel electrophoresis, Western blots, immunoprecipitation, and enzyme-linked immunoassays to detect polypeptides. Other techniques such as in situ hybridization, enzyme staining, and immunostaining also can be used to detect the presence or expression of polypeptides and/or polynucleotides.

### EXAMPLES

### Example 1: Sample Collection and Processing

[0112] Peripheral venous blood (2.0 ml) is collected in a Qiagen PAXgene Blood RNA Tube by phlebotomy. After sample collection, the PAXgene tubes are immediately inverted 8 to 10 times and placed in a tube rack at room temperature for no more than 3 hours. Samples are then frozen at −20° C., followed by −80° C. where available. No sample is subjected to more than one freeze and thaw cycle. Alternatively, fresh blood not subject to any freeze-thaw cycles are processed within 48 hours of collection.

[0113] Total RNA is extracted and purified from each sample using the Qiagen PAXgene Blood miRNA Kit. RNA concentration is measured with the NanoDrop® One Spectrophotomer (Thermo Fisher Scientific), and RNA quality is assessed on the Agilent 2100 Bioanalyzer. Samples are then analyzed using the ThermoFisher Ion GeneStudio S5 Next-Generation Sequencing System. Only samples with RNA yield ≥100 ng, RNA concentration ≥10 ng/μL, RNA integrity numbers of ≥5.0, and no instrument error messages are used for classifier training and validation.

### Example 2: Classifier Training and Analysis

[0114] A gene expression classifier consisting of biomarkers listed in Table 1 is trained with measurements from the 565 benign and 136 malignant samples in a training population. See, e.g. Table 4. The genes used in the multivariate classifier are selected using variable selection techniques based on contribution scores from random bootstrap forests and bootstrapped p-values from a generalized regression modeling using a lasso fitting algorithm. The final classifier combines the genes using a logistic model.

[0115] Sensitivity, specificity, and negative predictive value are used to evaluate performance of the classifier based on data from the training population. The selected gene expression classifier is then used to make predictions of disease in the validation population, which is an independent data set of samples not used in the training of the classifier. See, e.g. Table 4. Receiver Operating Characteristic (ROC) curve analysis is used to compare the performance of the gene expression classifier with that of the Mayo Clinic model, which is based exclusively on clinical parameters, including age, smoking status, cancer history, and location, size and shape of nodules. See Swensen S J, Silverstein M D, Ilstrup D M, Schleck C D, Edell E S. The probability of malignancy in solitary pulmonary nodules. Application to small radiologically indeterminate nodules. Arch Intern Med. 1997; 157(8):849-855. In addition, the performance of the gene expression classifier is assessed in the low, intermediate and high risk groups as identified by the Mayo Clinic Model. See id.

TABLE 4
Sample demographics for a training population and a validation population

| | Training Population | | | Validation Population | | |
|---|---|---|---|---|---|---|
| Category | Benign | Malignant | All | Benign | Malignant | All |
| Total, n | 565 | 136 | 701 | 169 | 80 | 249 |
| Sex, n | | | | | | |
| Female | 259 | 71 | 330 | 46 | 41 | 87 |
| Male | 306 | 65 | 371 | 123 | 39 | 162 |
| Age, yr | | | | | | |
| Median | 66 | 71 | 67 | 68 | 67 | 67.4 |
| Range | 24-92 | 46-88 | 24-92 | 40-91 | 42-89 | 40-91 |
| Smoking History^{c}, pack years | | | | | | |
| Median | 35 | 45 | 38 | 40 | 42 | 40 |
| Range | 0.2-200 | 2-185 | 0.2-200 | 1-600 | 15-110 | 1-600 |
| Nodule size, cm | | | | | | |
| Median | 1.0 | 1.8 | 1.1 | 0.9 | 1.7 | 1.2 |
| Range | 0.5-3.0 | 0.6-3.0 | 0.5-3.0 | 0.5-2.7 | 0.8-3.0 | 0.5-3.0 |
| Nodule size classification, n | | | | | | |
| 0.5 cm-0.7 cm | 177 | 4 | 181 | 59 | 0 | 59 |
| 0.8 cm-1.0 cm | 144 | 12 | 156 | 42 | 9 | 51 |
| 1.1 cm-2.0 cm | 193 | 71 | 264 | 50 | 45 | 95 |
| 2.1 cm-3.0 cm | 51 | 49 | 100 | 18 | 26 | 44 |
| Histologic diagnosis, n | | | | | | |
| Benign | 565 | 0 | 565 | 169 | 0 | 169 |
| Adenocarcinoma | 0 | 106 | 106 | 0 | 60 | 60 |
| NSCLC | 0 | 0 | 0 | 0 | 1 | 1 |
| Squamous | 0 | 30 | 30 | 0 | 18 | 18 |
| Neoplasm of uncertain | 0 | 0 | 0 | 0 | 1 | 1 |
| behavior | | | | | | |
| Fungal geographic | | | | | | |
| distribution, n | | | | | | |
| Coccidioidomycosis | 24 | 3 | 27 | 0 | 1 | 1 |
| Histoplasmosis/Blastomycosis | 268 | 56 | 324 | 113 | 33 | 146 |
| Histoplasmosis/Blastomycosis/ | 43 | 5 | 48 | 4 | 3 | 7 |
| Coccidioidomycosis | | | | | | |
| N/A | 230 | 72 | 302 | 52 | 43 | 95 |

### Example 3: Comparison of Training Population and Validation Population

[0116] Samples are prospectively collected, using the method of Example 1, from current and former smokers with lung nodules found by positive low-dose computed tomography (LDCT) screening at over 60 geographically, ethnically, and point-of-care diverse clinical sites across the United States. Inclusion criteria are ages 21 years old or older, current or past history of smoking tobacco, and having nodule sized between 0.5 cm and 3.0 cm as identified by LDCT or other imaging modalities. Exclusion criteria are as follows: (a) not a candidate for bronchoscopy, biopsy, or surgery; (b) current diagnosis of cancer with treatment.

[0117] Nodules are confirmed as either benign or malignant by radiology or by pathologic diagnosis through bronchoscopy, biopsy, and/or lung resection. A representative subset of 701 samples from 57 clinical sites are selected from the sample bank for the population used to train the gene expression classifier in accordance with Example 2. A separate representative subset of 250 samples from 44 clinical sites are selected from the sample bank in a blinded fashion for the population used to validate the performance of the classifier in accordance with Example 2. Among samples from patients with malignant nodules all cancer types are represented, including adenocarcinoma, squamous, NSCLC and other neoplasm, though larger numbers would be needed to confidently distinguish risk of lung cancer for each of these cancer types.

[0118] The training and validation populations are selected from the Lung Cancer-Reduce Unnecessary Biopsies Study (LC-RUBS) bank. The LC-RUBS has enrolled over 3000 qualifying subjects from over 60 clinical sites across the United States to explore blood-based RNA biomarkers for lung cancer screening and lung nodule evaluation. The LC-RUBS is designed to evaluate the potential utility of mRNA biomarkers in whole blood for the early detection of lung cancer in patients with lung nodules identified by LDCT or other imaging technologies across heterogeneous sites and geographies within the U.S. screening population. When complete, the LC-RUBS will be the largest prospective, multicenter, nationally representative cohort for the study of biomarkers in patients with 5-30 mm lung nodules to date. The purpose of the manuscript to be submitted is to describe the (1) LC-RUBS cohort and study design, (2) baseline characteristics of enrolled individuals, including demographic and clinical information, fungal geographic distribution, and lung nodule data; and (3) establishment of a biospecimen repository containing peripheral blood samples collected from the LC-RUBS cohort.

[0119] The training population is selected with a 40% prevalence based on sample sizes needed for numerical estimation of sensitivity, specificity, and AUC with pre-specified precision. The validation population is selected in a blinded fashion to reflect clinical populations (32% prevalence). Otherwise the two study populations are clinically comparable. There was no significant difference in the distribution or mean values for the Mayo scores, with a mean Mayo score of 0.28 in the training population and 0.31 in the validation population (t-test p-value=0.0662). There are also no significant differences in the individual components of the Mayo Clinic model, with similar values observed between the two populations for age, cancer history, smoking history, nodule size, spiculation, and location. There is a difference in the proportion of samples from males and females, with 53% males in the training population and 65% males in the validation population. There are no significant differences in rates of chronic obstructive pulmonary disease (COPD) or emphysema, with roughly half of samples from patients with COPD (50% training population, 52% validation population) and a third of samples from patients with emphysema (29% training population, 33% validation population).

### Example 4: Gene Expression Classifier Performance

[0120] Performance of a gene expression classifier in accordance with Example 2 is compared to the Mayo Clinic model by calculating the area under the ROC curve (AUC), which gives a measure of how well a test performs in identifying true positives and true negatives (FIG. 1A). The gene expression classifier in this example yields an AUC of 0.89 (0.5 cm-3.0 cm nodules), whereas the Mayo Clinic model yielded an AUC of 0.80. The difference in AUC values was significant (p-value=0.0065), indicating that the gene expression classifier of this example, which provides a purely biological assessment of the risk of cancer, significantly improves upon the clinical risk factors assessed in the Mayo Clinic model.

[0121] The individual classification of all benign and malignant lung nodules in the validation population is assessed visually using scatter plots (FIG. 1B). Applying the pre-specified threshold to estimate performance results in a sensitivity of 90% (95% CI, 82%-95%) and specificity of 75% (95% CI, 68%-81%) for the gene expression classifier of this example. These results support the ability of the classifier in differentiating benign from malignant lung nodules within the broad size range of 0.5 cm to 3.0 cm.

[0122] The probability that nodules identified as benign by the gene expression classifier truly are benign as determined by radiology or by pathologic diagnosis is assessed by calculating the negative predictive value (NPV) for the classifier over a range of cancer prevalence rates (FIG. 1C). This classifier shows NPVs of 98%, 95.6% and 92.7% at cancer prevalence rates of 10%, 20% and 30%, respectively. The high NPVs demonstrated for the classifier over a range of cancer prevalence rates indicate the classifier could be useful in helping rule out unnecessary biopsies for patients with lung nodules identified by LDCT.

[0123] The robustness of the gene expression classifier is examined by evaluating its' performance across a range of clinical variables. As revealed by the scatter plots shown in FIG. 2A, FIG. 2B, and FIG. 2C, no difference in classifier performance is observed based on sex, nodule size, or fungal geographic distribution. These results indicate that clinical variables, which reflect the heterogeneity of patients, do not influence the performance of the gene expression classifier. Despite potential biological differences between patients in the validation population, this classifier is able to reliably distinguish between benign and malignant lung nodules.

[0124] The more clinically challenging intermediate nodule size cases within the validation population are evaluated by calculating AUC values for the subset of samples from subjects with lung nodules between 8 cm and 30 cm and comparing those to the AUC values calculated for the entire validation population of subjects with lung nodules between 5 cm and 30 cm (FIG. 3). The gene expression classifier yields an AUC of 0.88 for the subset of samples from subjects with lung nodules between 8 cm and 30 cm, which is comparable to the AUC of 0.89 calculated for the entire validation population. By comparison, the Mayo Clinic model yields an AUC of 0.72 for the subset of samples from subjects with lung nodules between 8 cm and 30 cm, which is significantly lower than the AUC of 0.80 calculated for the entire validation population. These results show that this gene expression classifier performs equally well, while the performance of the Mayo Clinic model significantly declined for the more clinically challenging cases within the validation population.

### Example 5: A Second Expression Classifier

[0125] A second gene expression classifier consisting of a panel of biomarkers including ABCC13, AMD1, ANKHD1, CIR1, CLCN4, CLK3, CTSH, DNAJB1, EPHX2, GALNT14, GNAI2, GSR, IFI27, INO80C, LGR6, PDCD6IP, PNPLA6, PSMB4, RBPMS2, SCAF4, SLC25A20, SNRPD3, STAMBP, TMEM8A, UBAP2, VPS29, ZER1 is trained with measurements from benign and malignant samples in a training population. The selected gene expression classifier is then used to make predictions of disease in the validation population, which is an independent data set of samples not used in the training of the classifier.

### Example 6: A Third Expression Classifier

[0126] A second gene expression classifier consisting of a panel of biomarkers including AMD1, CIR1, CLCN4, CLK3, GNAI2, GSR, HDAC3, ITPR1, LGR6, LILRA5, PPM1M, PUM1, PSMB4, SCAF4, SLC25A20, SNRPD3, TPR, UBAP2, WDFY3, ZER1 is trained with measurements from benign and malignant samples in a training population. The selected gene expression classifier is then used to make predictions of disease in the validation population, which is an independent data set of samples not used in the training of the classifier.

[0127] From the foregoing, it will be appreciated that the present invention can be embodied in various ways, which include but not limited to the following:

[0128] Embodiment 1. A method comprising: determining whether a subject is at risk of lung cancer by: obtaining or having obtained non-invasively a biological sample from the subject; detecting expression level of ABCC13 in the biological sample; and comparing the expression level of ABCC13 to a reference level to determine if the subject is at risk of lung cancer; providing a recommendation that the subject is at risk of lung cancer based on said comparing.

[0129] Embodiment 2. A method comprising: determining whether a subject is at risk of lung cancer by: obtaining or having obtained non-invasively a biological sample from the subject; detecting expression level of ABCC13 in the biological sample; and comparing the expression level of ABCC13 to a reference level to determine if the subject is at risk of lung cancer; if the subject is at risk of lung cancer, obtaining or having obtained a biopsy from the subject to test for lung cancer.

[0130] Embodiment 3. The method of embodiment 1 or 2, further comprising detecting expression level of a second biomarker in the sample to establish a biomarker expression profile for the subject, the second biomarker is selected from the group consisting of: ADCK3, GALNT14, GNAI2, PPM1M, and ZER1, and where said comparing further comprises comparing the biomarker expression profile to a reference expression profile to determine if the subject is at risk of lung cancer.

[0131] Embodiment 4. The method of embodiment 1 or 2, further comprising detecting expression level of additional biomarkers in the sample to establish a biomarker expression profile for the subject, the additional biomarkers comprise two biomarkers selected from the group consisting of: ADCK3, GALNT14, GNAI2, PPM1M, and ZER1, and where said comparing further comprises comparing the biomarker expression profile to a reference expression profile to determine if the subject is at risk of lung cancer.

[0132] Embodiment 5. The method of embodiment 1 or 2, further comprising detecting expression level of additional biomarkers in the sample to establish a biomarker expression profile for the subject, the additional biomarkers comprise three biomarkers selected from the group consisting of: ADCK3, GALNT14, GNAI2, PPM1M, and ZER1, and where said comparing further comprises comparing the biomarker expression profile to a reference expression profile to determine if the subject is at risk of lung cancer.

[0133] Embodiment 6. The method of embodiment 1 or 2, further comprising detecting expression level of additional biomarkers in the sample to establish a biomarker expression profile for the subject, the additional biomarkers comprise four biomarkers selected from the group consisting of: ADCK3, GALNT14, GNAI2, PPM1M, and ZER1, and where said comparing further comprises comparing the biomarker expression profile to a reference expression profile to determine if the subject is at risk of lung cancer.

[0134] Embodiment 7. The method of embodiment 1 or 2, further comprising detecting expression level of additional biomarkers in the sample to establish a biomarker expression profile for the subject, the additional biomarkers comprise ADCK3, GALNT14, GNAI2, PPM1M, and ZER1, and where said comparing further comprises comparing the biomarker expression profile to a reference expression profile to determine if the subject is at risk of lung cancer.

[0135] Embodiment 8. The method of embodiment 1 or 2, where the expression level of ABCC13 is detected using a nucleic acid probe that binds to the nucleic acid sequence of SEQ ID NO: 2.

[0136] Embodiment 9. The method of embodiment 1 or 2, where the expression level of ABCC13 is detected using a nucleic acid probe comprising nucleic acid sequence of SEQ ID NO: 1, complements thereof, or fragments thereof having at least 15 nucleotides.

[0137] Embodiment 10. The method of embodiment 1 or 2, where the expression level of ABCC13 is detected using an antibody, or a fragment thereof, that binds to a protein having an amino acid sequence of SEQ ID NO: 3.

[0138] Embodiment 11. A method comprising: determining whether a subject is at risk of lung cancer by: obtaining or having obtained non-invasively a biological sample from the subject; detecting expression level of ADCK3 in the biological sample; and comparing the expression level of ADCK3 to a reference level to determine if the subject is at risk of lung cancer; providing a recommendation that the subject is at risk of lung cancer based on said comparing.

[0139] Embodiment 12. A method comprising: determining whether a subject is at risk of lung cancer by: obtaining or having obtained non-invasively a biological sample from the subject; detecting expression level of ADCK3 in the biological sample; and comparing the expression level of ADCK3 to a reference level to determine if the subject is at risk of lung cancer; if the subject is at risk of lung cancer, obtaining or having obtained a biopsy from the subject to test for lung cancer.

[0140] Embodiment 13. The method of embodiment 11 or 12, further comprising detecting expression level of a second biomarker in the sample to establish a biomarker expression profile for the subject, the second biomarker is selected from the group consisting of: ABCC13, GALNT14, GNAI2, PPM1M, and ZER1, and where said comparing further comprises comparing the biomarker expression profile to a reference expression profile to determine if the subject is at risk of lung cancer.

[0141] Embodiment 14. The method of embodiment 11 or 12, further comprising detecting expression level of additional biomarkers in the sample to establish a biomarker expression profile for the subject, the additional biomarkers comprise two biomarkers selected from the group consisting of: ABCC13, GALNT14, GNAI2, PPM1M, and ZER1, and where said comparing further comprises comparing the biomarker expression profile to a reference expression profile to determine if the subject is at risk of lung cancer.

[0142] Embodiment 15. The method of embodiment 11 or 12, further comprising detecting expression level of additional biomarkers in the sample to establish a biomarker expression profile for the subject, the additional biomarkers comprise three biomarkers selected from the group consisting of: ABCC13, GALNT14, GNAI2, PPM1M, and ZER1, and where said comparing further comprises comparing the biomarker expression profile to a reference expression profile to determine if the subject is at risk of lung cancer.

[0143] Embodiment 16. The method of embodiment 11 or 12, further comprising detecting expression level of additional biomarkers in the sample to establish a biomarker expression profile for the subject, the additional biomarkers comprise four biomarkers selected from the group consisting of: ABCC13, GALNT14, GNAI2, PPM1M, and ZER1, and where said comparing further comprises comparing the biomarker expression profile to a reference expression profile to determine if the subject is at risk of lung cancer.

[0144] Embodiment 17. The method of embodiment 11 or 12, further comprising detecting expression level of additional biomarkers in the sample to establish a biomarker expression profile for the subject, the additional biomarkers comprise ABCC13, GALNT14, GNAI2, PPM1M, and ZER1, and where said comparing further comprises comparing the biomarker expression profile to a reference expression profile to determine if the subject is at risk of lung cancer.

[0145] Embodiment 18. The method of embodiment 11 or 12, where the expression level of ADCK3 is detected using a nucleic acid probe that binds to the nucleic acid sequence of SEQ ID NO: 5.

[0146] Embodiment 19. The method of embodiment 11 or 12, where the expression level of ADCK3 is detected using a nucleic acid probe comprising nucleic acid sequence of SEQ ID NO: 4, complements thereof, or fragments thereof having at least 15 nucleotides.

[0147] Embodiment 20. The method of embodiment 11 or 12, where the expression level of ADCK3 is detected using an antibody, or a fragment thereof, that binds to a protein having an amino acid sequence of SEQ ID NO: 6.

[0148] Embodiment 21. A method comprising: determining whether a subject is at risk of lung cancer by: obtaining or having obtained non-invasively a biological sample from the subject; detecting expression level of GALNT14 in the biological sample; and comparing the expression level of GALNT14 to a reference level to determine if the subject is at risk of lung cancer; providing a recommendation that the subject is at risk of lung cancer based on said comparing.

[0149] Embodiment 22. A method comprising: determining whether a subject is at risk of lung cancer by: obtaining or having obtained non-invasively a biological sample from the subject; detecting expression level of GALNT14 in the biological sample; and comparing the expression level of GALNT14 to a reference level to determine if the subject is at risk of lung cancer; if the subject is at risk of lung cancer, obtaining or having obtained a biopsy from the subject to test for lung cancer.

[0150] Embodiment 23. The method of embodiment 21 or 22, further comprising detecting expression level of a second biomarker in the sample to establish a biomarker expression profile for the subject, the second biomarker is selected from the group consisting of: ABCC13, ADCK3, GNAI2, PPM1M, and ZER1, and where said comparing further comprises comparing the biomarker expression profile to a reference expression profile to determine if the subject is at risk of lung cancer.

[0151] Embodiment 24. The method of embodiment 21 or 22, further comprising detecting expression level of additional biomarkers in the sample to establish a biomarker expression profile for the subject, the additional biomarkers comprise two biomarkers selected from the group consisting of: ABCC13, ADCK3, GNAI2, PPM1M, and ZER1, and where said comparing further comprises comparing the biomarker expression profile to a reference expression profile to determine if the subject is at risk of lung cancer.

[0152] Embodiment 25. The method of embodiment 21 or 22, further comprising detecting expression level of additional biomarkers in the sample to establish a biomarker expression profile for the subject, the additional biomarkers comprise three biomarkers selected from the group consisting of: ABCC13, ADCK3, GNAI2, PPM1M, and ZER1, and where said comparing further comprises comparing the biomarker expression profile to a reference expression profile to determine if the subject is at risk of lung cancer.

[0153] Embodiment 26. The method of embodiment 21 or 22, further comprising detecting expression level of additional biomarkers in the sample to establish a biomarker expression profile for the subject, the additional biomarkers comprise four biomarkers selected from the group consisting of: ABCC13, ADCK3, GNAI2, PPM1M, and ZER1, and where said comparing further comprises comparing the biomarker expression profile to a reference expression profile to determine if the subject is at risk of lung cancer.

[0154] Embodiment 27. The method of embodiment 21 or 22, further comprising detecting expression level of additional biomarkers in the sample to establish a biomarker expression profile for the subject, the additional biomarkers comprise ABCC13, ADCK3, GNAI2, PPM1M, and ZER1, and where said comparing further comprises comparing the biomarker expression profile to a reference expression profile to determine if the subject is at risk of lung cancer.

[0155] Embodiment 28. The method of embodiment 21 or 22, where the expression level of GALNT14 is detected using a nucleic acid probe that binds to the nucleic acid sequence of SEQ ID NO: 23.

[0156] Embodiment 29. The method of embodiment 21 or 22, where the expression level of GALNT14 is detected using a nucleic acid probe comprising nucleic acid sequence of SEQ ID NO: 22, complements thereof, or fragments thereof having at least 15 nucleotides.

[0157] Embodiment 30. The method of embodiment 21 or 22, where the expression level of GALNT14 is detected using an antibody, or a fragment thereof, that binds to a protein having an amino acid sequence of SEQ ID NO: 24.

[0158] Embodiment 31. A method comprising: determining whether a subject is at risk of lung cancer by: obtaining or having obtained non-invasively a biological sample from the subject; detecting expression level of GNAI2 in the biological sample; and comparing the expression level of GNAI2 to a reference level to determine if the subject is at risk of lung cancer; providing a recommendation that the subject is at risk of lung cancer based on said comparing.

[0159] Embodiment 32. A method comprising: determining whether a subject is at risk of lung cancer by: obtaining or having obtained non-invasively a biological sample from the subject; detecting expression level of GNAI2 in the biological sample; and comparing the expression level of GNAI2 to a reference level to determine if the subject is at risk of lung cancer; if the subject is at risk of lung cancer, obtaining or having obtained a biopsy from the subject to test for lung cancer.

[0160] Embodiment 33. The method of embodiment 31 or 32, further comprising detecting expression level of a second biomarker in the sample to establish a biomarker expression profile for the subject, the second biomarker is selected from the group consisting of: ABCC13, ADCK3, GALNT14, PPM1M, and ZER1, and where said comparing further comprises comparing the biomarker expression profile to a reference expression profile to determine if the subject is at risk of lung cancer.

[0161] Embodiment 34. The method of embodiment 31 or 32, further comprising detecting expression level of additional biomarkers in the sample to establish a biomarker expression profile for the subject, the additional biomarkers comprise two biomarkers selected from the group consisting of: ABCC13, ADCK3, GALNT14, PPM1M, and ZER1, and where said comparing further comprises comparing the biomarker expression profile to a reference expression profile to determine if the subject is at risk of lung cancer.

[0162] Embodiment 35. The method of embodiment 31 or 32, further comprising detecting expression level of additional biomarkers in the sample to establish a biomarker expression profile for the subject, the additional biomarkers comprise three biomarkers selected from the group consisting of: ABCC13, ADCK3, GALNT14, PPM1M, and ZER1, and where said comparing further comprises comparing the biomarker expression profile to a reference expression profile to determine if the subject is at risk of lung cancer.

[0163] Embodiment 36. The method of embodiment 31 or 32, further comprising detecting expression level of additional biomarkers in the sample to establish a biomarker expression profile for the subject, the additional biomarkers comprise four biomarkers selected from the group consisting of: ABCC13, ADCK3, GALNT14, PPM1M, and ZER1, and where said comparing further comprises comparing the biomarker expression profile to a reference expression profile to determine if the subject is at risk of lung cancer.

[0164] Embodiment 37. The method of embodiment 31 or 32, further comprising detecting expression level of additional biomarkers in the sample to establish a biomarker expression profile for the subject, the additional biomarkers comprise ABCC13, ADCK3, GALNT14, PPM1M, and ZER1, and where said comparing further comprises comparing the biomarker expression profile to a reference expression profile to determine if the subject is at risk of lung cancer.

[0165] Embodiment 38. The method of embodiment 31 or 32, where the expression level of GNAI2 is detected using a nucleic acid probe that binds to the nucleic acid sequence of SEQ ID NO: 26.

[0166] Embodiment 39. The method of embodiment 31 or 32, where the expression level of GNAI2 is detected using a nucleic acid probe comprising nucleic acid sequence of SEQ ID NO: 25, complements thereof, or fragments thereof having at least 15 nucleotides.

[0167] Embodiment 40. The method of embodiment 31 or 32, where the expression level of GNAI2 is detected using an antibody, or a fragment thereof, that binds to a protein having an amino acid sequence of SEQ ID NO: 27.

[0168] Embodiment 41. A method comprising: determining whether a subject is at risk of lung cancer by: obtaining or having obtained non-invasively a biological sample from the subject; detecting expression level of PPM1M in the biological sample; and comparing the expression level of PPM1M to a reference level to determine if the subject is at risk of lung cancer; providing a recommendation that the subject is at risk of lung cancer based on said comparing.

[0169] Embodiment 42. A method comprising: determining whether a subject is at risk of lung cancer by: obtaining or having obtained non-invasively a biological sample from the subject; detecting expression level of PPM1M in the biological sample; and comparing the expression level of PPM1M to a reference level to determine if the subject is at risk of lung cancer; if the subject is at risk of lung cancer, obtaining or having obtained a biopsy from the subject to test for lung cancer.

[0170] Embodiment 43. The method of embodiment 41 or 42, further comprising detecting expression level of a second biomarker in the sample to establish a biomarker expression profile for the subject, the second biomarker is selected from the group consisting of: ABCC13, ADCK3, GALNT14, GNAI2, and ZER1, and where said comparing further comprises comparing the biomarker expression profile to a reference expression profile to determine if the subject is at risk of lung cancer.

[0171] Embodiment 44. The method of embodiment 41 or 42, further comprising detecting expression level of additional biomarkers in the sample to establish a biomarker expression profile for the subject, the additional biomarkers comprise two biomarkers selected from the group consisting of: ABCC13, ADCK3, GALNT14, GNAI2, and ZER1, and where said comparing further comprises comparing the biomarker expression profile to a reference expression profile to determine if the subject is at risk of lung cancer.

[0172] Embodiment 45. The method of embodiment 41 or 42, further comprising detecting expression level of additional biomarkers in the sample to establish a biomarker expression profile for the subject, the additional biomarkers comprise three biomarkers selected from the group consisting of: ABCC13, ADCK3, GALNT14, GNAI2, and ZER1, and where said comparing further comprises comparing the biomarker expression profile to a reference expression profile to determine if the subject is at risk of lung cancer.

[0173] Embodiment 46. The method of embodiment 41 or 42, further comprising detecting expression level of additional biomarkers in the sample to establish a biomarker expression profile for the subject, the additional biomarkers comprise four biomarkers selected from the group consisting of: ABCC13, ADCK3, GALNT14, GNAI2, and ZER1, and where said comparing further comprises comparing the biomarker expression profile to a reference expression profile to determine if the subject is at risk of lung cancer.

[0174] Embodiment 47. The method of embodiment 41 or 42, further comprising detecting expression level of additional biomarkers in the sample to establish a biomarker expression profile for the subject, the additional biomarkers comprise ABCC13, ADCK3, GALNT14, GNAI2, and ZER1, and where said comparing further comprises comparing the biomarker expression profile to a reference expression profile to determine if the subject is at risk of lung cancer.

[0175] Embodiment 48. The method of embodiment 41 or 42, where the expression level of PPM1M is detected using a nucleic acid probe that binds to the nucleic acid sequence of SEQ ID NO: 92.

[0176] Embodiment 49. The method of embodiment 41 or 42, where the expression level of PPM1M is detected using a nucleic acid probe comprising nucleic acid sequence of SEQ ID NO: 91, complements thereof, or fragments thereof having at least 15 nucleotides.

[0177] Embodiment 50. The method of embodiment 41 or 42, where the expression level of PPM1M is detected using an antibody, or a fragment thereof, that binds to a protein having an amino acid sequence of SEQ ID NO: 93.

[0178] Embodiment 51. A method comprising: determining whether a subject is at risk of lung cancer by: obtaining or having obtained non-invasively a biological sample from the subject; detecting expression level of ZER1 in the biological sample; and comparing the expression level of ZER1 to a reference level to determine if the subject is at risk of lung cancer; providing a recommendation that the subject is at risk of lung cancer based on said comparing.

[0179] Embodiment 52. A method comprising: determining whether a subject is at risk of lung cancer by: obtaining or having obtained non-invasively a biological sample from the subject; detecting expression level of ZER1 in the biological sample; and comparing the expression level of ZER1 to a reference level to determine if the subject is at risk of lung cancer; if the subject is at risk of lung cancer, obtaining or having obtained a biopsy from the subject to test for lung cancer.

[0180] Embodiment 53. The method of embodiment 51 or 52, further comprising detecting expression level of a second biomarker in the sample to establish a biomarker expression profile for the subject, the second biomarker is selected from the group consisting of: ABCC13, ADCK3, GALNT14, GNAI2, and PPM1M, and where said comparing further comprises comparing the biomarker expression profile to a reference expression profile to determine if the subject is at risk of lung cancer.

[0181] Embodiment 54. The method of embodiment 51 or 52, further comprising detecting expression level of additional biomarkers in the sample to establish a biomarker expression profile for the subject, the additional biomarkers comprise two biomarkers selected from the group consisting of: ABCC13, ADCK3, GALNT14, GNAI2, and PPM1M, and where said comparing further comprises comparing the biomarker expression profile to a reference expression profile to determine if the subject is at risk of lung cancer.

[0182] Embodiment 55. The method of embodiment 51 or 52, further comprising detecting expression level of additional biomarkers in the sample to establish a biomarker expression profile for the subject, the additional biomarkers comprise three biomarkers selected from the group consisting of: ABCC13, ADCK3, GALNT14, GNAI2, and PPM1M, and where said comparing further comprises comparing the biomarker expression profile to a reference expression profile to determine if the subject is at risk of lung cancer.

[0183] Embodiment 56. The method of embodiment 51 or 52, further comprising detecting expression level of additional biomarkers in the sample to establish a biomarker expression profile for the subject, the additional biomarkers comprise four biomarkers selected from the group consisting of: ABCC13, ADCK3, GALNT14, GNAI2, and PPM1M, and where said comparing further comprises comparing the biomarker expression profile to a reference expression profile to determine if the subject is at risk of lung cancer.

[0184] Embodiment 57. The method of embodiment 51 or 52, further comprising detecting expression level of additional biomarkers in the sample to establish a biomarker expression profile for the subject, the additional biomarkers comprise ABCC13, ADCK3, GALNT14, GNAI2, and PPM1M, and where said comparing further comprises comparing the biomarker expression profile to a reference expression profile to determine if the subject is at risk of lung cancer.

[0185] Embodiment 58. The method of embodiment 51 or 52, where the expression level of ZER1 is detected using a nucleic acid probe that binds to the nucleic acid sequence of SEQ ID NO: 68.

[0186] Embodiment 59. The method of embodiment 51 or 52, where the expression level of ZER1 is detected using a nucleic acid probe comprising nucleic acid sequence of SEQ ID NO: 67, complements thereof, or fragments thereof having at least 15 nucleotides.

[0187] Embodiment 60. The method of embodiment 51 or 52, where the expression level of ZER1 is detected using an antibody, or a fragment thereof, that binds to a protein having an amino acid sequence of SEQ ID NO: 69.

[0188] Embodiment 61. The method of any one of embodiments 1 to 60, further comprising detecting expression level of one or more biomarkers selected from the group consisting of AMD1, CLCN4, PDCD6IP, PUM1, RBPMS2, and UBAP2 to establish a biomarker expression profile for the subject.

[0189] Embodiment 62. The method of any one of embodiments 1 to 60, further comprising detecting expression level of two or more biomarkers selected from the group consisting of AMD1, CLCN4, PDCD6IP, PUM1, RBPMS2, and UBAP2 to establish a biomarker expression profile for the subject.

[0190] Embodiment 63. The method of any one of embodiments 1 to 60, further comprising detecting expression level of three or more biomarkers selected from the group consisting of AMD1, CLCN4, PDCD6IP, PUM1, RBPMS2, and UBAP2 to establish a biomarker expression profile for the subject.

[0191] Embodiment 64. The method of any one of embodiments 1 to 60, further comprising detecting expression level of four or more biomarkers selected from the group consisting of AMD1, CLCN4, PDCD6IP, PUM1, RBPMS2, and UBAP2 to establish a biomarker expression profile for the subject.

[0192] Embodiment 65. The method of any one of embodiments 1 to 60, further comprising detecting expression level of five or more biomarkers selected from the group consisting of AMD1, CLCN4, PDCD6IP, PUM1, RBPMS2, and UBAP2 to establish a biomarker expression profile for the subject.

[0193] Embodiment 66. The method of any one of embodiments 1 to 60, further comprising detecting expression level of AMD1, CLCN4, PDCD6IP, PUM1, RBPMS2, and UBAP2 to establish a biomarker expression profile for the subject.

[0194] Embodiment 67. The method of any one of embodiments 61 to 66, where the expression level of AMD1 is detected using a nucleic acid probe comprising nucleic acid sequence of SEQ ID NO: 7, complements thereof, or fragments thereof having at least 15 nucleotides.

[0195] Embodiment 68. The method of any one of embodiments 61 to 66, where the expression level of CLCN4 is detected using a nucleic acid probe comprising nucleic acid sequence of SEQ ID NO: 73, complements thereof, or fragments thereof having at least 15 nucleotides.

[0196] Embodiment 69. The method of any one of embodiments 61 to 66, where the expression level of PDCD6IP is detected using a nucleic acid probe comprising nucleic acid sequence of SEQ ID NO: 40, complements thereof, or fragments thereof having at least 15 nucleotides.

[0197] Embodiment 70. The method of any one of embodiments 61 to 66, where the expression level of PUM1 is detected using a nucleic acid probe comprising nucleic acid sequence of SEQ ID NO: 94, complements thereof, or fragments thereof having at least 15 nucleotides.

[0198] Embodiment 71. The method of any one of embodiments 61 to 66, where the expression level of RBPMS2 is detected using a nucleic acid probe comprising nucleic acid sequence of SEQ ID NO: 97, complements thereof, or fragments thereof having at least 15 nucleotides.

[0199] Embodiment 72. The method of any one of embodiments 61 to 66, where the expression level of UBAP2 is detected using a nucleic acid probe comprising nucleic acid sequence of SEQ ID NO: 58, complements thereof, or fragments thereof having at least 15 nucleotides.

[0200] Embodiment 73. The method of any one of embodiments 1 to 72, further comprising detecting expression level of a set of biomarkers comprising one or more biomarkers selected from the group consisting of ANKHD1, CIR1, CLK3, CTSH, DNAJB1, EPHX2, GSR, HDAC3, IFI27, INO80C, ITPR1, LGR6, LILRA5, PNPLA6, PSMB4, SCAF4, SLC25A20, SNRPD3, STAMBP, TMEM8A, TPR, VNN1, VPS29, and WDFY3 to establish a biomarker expression profile for the subject.

[0201] Embodiment 74. The method of embodiment 73, where the set of biomarkers comprises five or more biomarkers.

[0202] Embodiment 75. The method of embodiment 73, where the set of biomarkers comprises ten or more biomarkers.

[0203] Embodiment 76. The method of embodiment 73, where the set of biomarkers comprises fifteen or more biomarkers.

[0204] Embodiment 77. The method of embodiment 73, where the set of biomarkers comprises twenty or more biomarkers.

[0205] Embodiment 78. The method of embodiment 73, where the set of biomarkers comprises all the biomarkers.

[0206] Embodiment 79. The method of any one of embodiments 73 to 78, where the expression level of ANKHD1 is detected using a nucleic acid probe comprising nucleic acid sequence of SEQ ID NO: 70, complements thereof, or fragments thereof having at least 15 nucleotides.

[0207] Embodiment 80. The method of any one of embodiments 73 to 78, where the expression level of CIR1 is detected using a nucleic acid probe comprising nucleic acid sequence of SEQ ID NO: 10, complements thereof, or fragments thereof having at least 15 nucleotides.

[0208] Embodiment 81. The method of any one of embodiments 73 to 78, where the expression level of CLK3 is detected using a nucleic acid probe comprising nucleic acid sequence of SEQ ID NO: 13, complements thereof, or fragments thereof having at least 15 nucleotides.

[0209] Embodiment 82. The method of any one of embodiments 73 to 78, where the expression level of CTSH is detected using a nucleic acid probe comprising nucleic acid sequence of SEQ ID NO: 76, complements thereof, or fragments thereof having at least 15 nucleotides.

[0210] Embodiment 83. The method of any one of embodiments 73 to 78, where the expression level of DNAJB1 is detected using a nucleic acid probe comprising nucleic acid sequence of SEQ ID NO: 16, complements thereof, or fragments thereof having at least 15 nucleotides.

[0211] Embodiment 84. The method of any one of embodiments 73 to 78, where the expression level of EPHX2 is detected using a nucleic acid probe comprising nucleic acid sequence of SEQ ID NO: 19, complements thereof, or fragments thereof having at least 15 nucleotides.

[0212] Embodiment 85. The method of any one of embodiments 73 to 78, where the expression level of GSR is detected using a nucleic acid probe comprising nucleic acid sequence of SEQ ID NO: 28, complements thereof, or fragments thereof having at least 15 nucleotides.

[0213] Embodiment 86. The method of any one of embodiments 73 to 78, where the expression level of HDAC3 is detected using a nucleic acid probe comprising nucleic acid sequence of SEQ ID NO: 79, complements thereof, or fragments thereof having at least 15 nucleotides.

[0214] Embodiment 87. The method of any one of embodiments 73 to 78, where the expression level of IFI27 is detected using a nucleic acid probe comprising nucleic acid sequence of SEQ ID NO: 31, complements thereof, or fragments thereof having at least 15 nucleotides.

[0215] Embodiment 88. The method of any one of embodiments 73 to 78, where the expression level of INO80C is detected using a nucleic acid probe comprising nucleic acid sequence of SEQ ID NO: 34, complements thereof, or fragments thereof having at least 15 nucleotides.

[0216] Embodiment 89. The method of any one of embodiments 73 to 78, where the expression level of ITPR1 is detected using a nucleic acid probe comprising nucleic acid sequence of SEQ ID NO: 82, complements thereof, or fragments thereof having at least 15 nucleotides.

[0217] Embodiment 90. The method of any one of embodiments 73 to 78, where the expression level of LGR6 is detected using a nucleic acid probe comprising nucleic acid sequence of SEQ ID NO: 37, complements thereof, or fragments thereof having at least 15 nucleotides.

[0218] Embodiment 91. The method of any one of embodiments 73 to 78, where the expression level of LILRA5 is detected using a nucleic acid probe comprising nucleic acid sequence of SEQ ID NO: 85, complements thereof, or fragments thereof having at least 15 nucleotides.

[0219] Embodiment 92. The method of any one of embodiments 73 to 78, where the expression level of PNPLA6 is detected using a nucleic acid probe comprising nucleic acid sequence of SEQ ID NO: 88, complements thereof, or fragments thereof having at least 15 nucleotides.

[0220] Embodiment 93. The method of any one of embodiments 73 to 78, where the expression level of PSMB4 is detected using a nucleic acid probe comprising nucleic acid sequence of SEQ ID NO: 43, complements thereof, or fragments thereof having at least 15 nucleotides.

[0221] Embodiment 94. The method of any one of embodiments 73 to 78, where the expression level of SCAF4 is detected using a nucleic acid probe comprising nucleic acid sequence of SEQ ID NO: 46, complements thereof, or fragments thereof having at least 15 nucleotides.

[0222] Embodiment 95. The method of any one of embodiments 73 to 78, where the expression level of SLC25A20 is detected using a nucleic acid probe comprising nucleic acid sequence of SEQ ID NO: 100, complements thereof, or fragments thereof having at least 15 nucleotides.

[0223] Embodiment 96. The method of any one of embodiments 73 to 78, where the expression level of SNRPD3 is detected using a nucleic acid probe comprising nucleic acid sequence of SEQ ID NO: 49, complements thereof, or fragments thereof having at least 15 nucleotides.

[0224] Embodiment 97. The method of any one of embodiments 73 to 78, where the expression level of STAMBP is detected using a nucleic acid probe comprising nucleic acid sequence of SEQ ID NO: 52, complements thereof, or fragments thereof having at least 15 nucleotides.

[0225] Embodiment 98. The method of any one of embodiments 73 to 78, where the expression level of TMEM8A is detected using a nucleic acid probe comprising nucleic acid sequence of SEQ ID NO: 55, complements thereof, or fragments thereof having at least 15 nucleotides.

[0226] Embodiment 99. The method of any one of embodiments 73 to 78, where the expression level of TPR is detected using a nucleic acid probe comprising nucleic acid sequence of SEQ ID NO: 103, complements thereof, or fragments thereof having at least 15 nucleotides.

[0227] Embodiment 100. The method of any one of embodiments 73 to 78, where the expression level of VNN1 is detected using a nucleic acid probe comprising nucleic acid sequence of SEQ ID NO: 61, complements thereof, or fragments thereof having at least 15 nucleotides.

[0228] Embodiment 101. The method of any one of embodiments 73 to 78, where the expression level of VPS29 is detected using a nucleic acid probe comprising nucleic acid sequence of SEQ ID NO: 64, complements thereof, or fragments thereof having at least 15 nucleotides.

[0229] Embodiment 102. The method of any one of embodiments 73 to 78, where the expression level of WDFY3 is detected using a nucleic acid probe comprising nucleic acid sequence of SEQ ID NO: 106, complements thereof, or fragments thereof having at least 15 nucleotides.

[0230] Embodiment 103. The method of any one of embodiments 1 to 102, where the biological sample is blood.

[0231] Embodiment 104. The method of any one of embodiments 1 to 103, where the subject is a human.

[0232] Embodiment 105. The method of any one of embodiments 1 to 104, where the subject has one or more lung nodules suspect of being cancerous.

[0233] Embodiment 106. The method of embodiment 105, where the one or more lung nodules have diameters in the range of 0.8 cm to 2 cm.

[0234] Embodiment 107. The method of any one of embodiments 1 to 106, where the lung cancer is non-small cell lung cancer (NSCLC).

[0235] Embodiment 108. The method of embodiment 107, where the NSCLC is a stage I NSCLC.

[0236] Embodiment 109. The method of embodiment 107, where the NSCLC is a stage II NSCLC.

[0237] Embodiment 110. The method of embodiment 107, where the NSCLC is a mixture of early and late stages and types of NSCLC.

[0238] Embodiment 111. The method of any one of embodiments 1 to 106, where the lung cancer is lung adenocarcinoma.

[0239] Embodiment 112. The method of any one of embodiments 1 to 106, where the lung cancer is lung squamous cell carcinoma.

[0240] Embodiment 113. The method of any one of embodiments 1 to 106, where the lung cancer is a lung carcinoid tumor.

[0241] Embodiment 114. The method of embodiment 113, where the lung carcinoid tumor is a typical carcinoid tumor of the lung.

[0242] Embodiment 115. The method of embodiment 113, where the lung carcinoid tumor is an atypical carcinoid tumor of the lung.

[0243] Embodiment 116. The method of any one of embodiments 1 to 106, where the lung cancer is adenosquamous carcinoma of the lung.

[0244] Embodiment 117. The method of any one of embodiments 2, 12, 22, 32, 42, and 52, further comprising the step of confirming or having confirmed that the subject has lung cancer based on the biopsy.

[0245] Embodiment 118. The method of embodiment 117, further comprising administering or having administered a lung cancer therapy to the subject.

[0246] Embodiment 119. The method of embodiment 118, where the lung cancer therapy is selected from the group consisting of surgery, chemotherapy, radiation therapy, targeted therapy and immunotherapy.

[0247] Embodiment 120. The method of embodiment 119, where the chemotherapy is selected from the group consisting of cisplatin or carboplatin plus docetaxel, gemcitabine, paclitaxel, vinorelbine, and pemetrexed, or a combination thereof.

[0248] Embodiment 121. The method of embodiment 119, where the targeted therapy is selected from the group consisting of Erlotinib, Afatinib, Gefitinib, Bevacizumab, Crizotinib, and Ceritinib.

[0249] Embodiment 122. A kit comprising a probe for detecting the expression level of ABCC13 for determining whether a subject is at risk of lung cancer.

[0250] Embodiment 123. The kit of embodiment 122, where the probe is a nucleic acid probe detecting the nucleic acid sequence of SEQ ID NO: 2.

[0251] Embodiment 124. The kit of embodiment 122, where the probe is a nucleic acid probe comprising nucleic acid sequence of SEQ ID NO: 1, complements thereof, or fragments thereof having at least 15 nucleotides.

[0252] Embodiment 125. The kit of embodiment 122, where the probe is an antibody, or a fragment thereof, that binds to a protein having an amino acid sequence of SEQ ID NO: 3.

[0253] Embodiment 126. The kit of embodiment 122, further comprising one or more probes for detecting the expression level of one or more biomarkers selected from the group consisting of ADCK3, GALNT14, GNAI2, PPM1M, and ZER1.

[0254] Embodiment 127. The kit of embodiment 126, where the expression level of ADCK3 is detected using a nucleic acid probe comprising nucleic acid sequence of SEQ ID NO: 4, complements thereof, or fragments thereof having at least 15 nucleotides.

[0255] Embodiment 128. The kit of embodiment 126, where the expression level of GALNT14 is detected using a nucleic acid probe comprising nucleic acid sequence of SEQ ID NO: 22, complements thereof, or fragments thereof having at least 15 nucleotides.

[0256] Embodiment 129. The kit of embodiment 126, where the expression level of GNAI2 is detected using a nucleic acid probe comprising nucleic acid sequence of SEQ ID NO: 25, complements thereof, or fragments thereof having at least 15 nucleotides.

[0257] Embodiment 130. The kit of embodiment 126, where the expression level of PPM1M is detected using a nucleic acid probe comprising nucleic acid sequence of SEQ ID NO: 91, complements thereof, or fragments thereof having at least 15 nucleotides.

[0258] Embodiment 131. The kit of embodiment 126, where the expression level of ZER1 is detected using a nucleic acid probe comprising nucleic acid sequence of SEQ ID NO: 67, complements thereof, or fragments thereof having at least 15 nucleotides.

[0259] Embodiment 132. A kit comprising a probe for detecting the expression level of ADCK3 for determining whether a subject is at risk of lung cancer.

[0260] Embodiment 133. The kit of embodiment 132, where the probe is a nucleic acid probe detecting the nucleic acid sequence of SEQ ID NO: 5.

[0261] Embodiment 134. The kit of embodiment 132, where the probe is a nucleic acid probe comprising nucleic acid sequence of SEQ ID NO: 4, complements thereof, or fragments thereof having at least 15 nucleotides.

[0262] Embodiment 135. The kit of embodiment 132, where the probe is an antibody, or a fragment thereof, that binds to a protein having an amino acid sequence of SEQ ID NO: 6.

[0263] Embodiment 136. The kit of embodiment 132, further comprising one or more probes for detecting the expression level of one or more biomarkers selected from the group consisting of ABCC13, GALNT14, GNAI2, PPM1M, and ZER1.

[0264] Embodiment 137. The kit of embodiment 136, where the expression level of ABCC13 is detected using a nucleic acid probe comprising nucleic acid sequence of SEQ ID NO: 1, complements thereof, or fragments thereof having at least 15 nucleotides.

[0265] Embodiment 138. The kit of embodiment 136, where the expression level of GALNT14 is detected using a nucleic acid probe comprising nucleic acid sequence of SEQ ID NO: 22, complements thereof, or fragments thereof having at least 15 nucleotides.

[0266] Embodiment 139. The kit of embodiment 136, where the expression level of GNAI2 is detected using a nucleic acid probe comprising nucleic acid sequence of SEQ ID NO: 25, complements thereof, or fragments thereof having at least 15 nucleotides.

[0267] Embodiment 140. The kit of embodiment 136, where the expression level of PPM1M is detected using a nucleic acid probe comprising nucleic acid sequence of SEQ ID NO: 91, complements thereof, or fragments thereof having at least 15 nucleotides.

[0268] Embodiment 141. The kit of embodiment 136, where the expression level of ZER1 is detected using a nucleic acid probe comprising nucleic acid sequence of SEQ ID NO: 67, complements thereof, or fragments thereof having at least 15 nucleotides.

[0269] Embodiment 142. A kit comprising a probe for detecting the expression level of GALNT14 for determining whether a subject is at risk of lung cancer.

[0270] Embodiment 143. The kit of embodiment 142, where the probe is a nucleic acid probe detecting the nucleic acid sequence of SEQ ID NO: 23.

[0271] Embodiment 144. The kit of embodiment 142, where the probe is a nucleic acid probe comprising nucleic acid sequence of SEQ ID NO: 22, complements thereof, or fragments thereof having at least 15 nucleotides.

[0272] Embodiment 145. The kit of embodiment 142, where the probe is an antibody, or a fragment thereof, that binds to a protein having an amino acid sequence of SEQ ID NO: 24.

[0273] Embodiment 146. The kit of embodiment 142, further comprising one or more probes for detecting the expression level of one or more biomarkers selected from the group consisting of ABCC13, ADCK3, GNAI2, PPM1M, and ZER1.

[0274] Embodiment 147. The kit of embodiment 146, where the expression level of ABCC13 is detected using a nucleic acid probe comprising nucleic acid sequence of SEQ ID NO: 1, complements thereof, or fragments thereof having at least 15 nucleotides.

[0275] Embodiment 148. The kit of embodiment 146, where the expression level of ADCK3 is detected using a nucleic acid probe comprising nucleic acid sequence of SEQ ID NO: 4, complements thereof, or fragments thereof having at least 15 nucleotides.

[0276] Embodiment 149. The kit of embodiment 146, where the expression level of GNAI2 is detected using a nucleic acid probe comprising nucleic acid sequence of SEQ ID NO: 25, complements thereof, or fragments thereof having at least 15 nucleotides.

[0277] Embodiment 150. The kit of embodiment 146, where the expression level of PPM1M is detected using a nucleic acid probe comprising nucleic acid sequence of SEQ ID NO: 91, complements thereof, or fragments thereof having at least 15 nucleotides.

[0278] Embodiment 151. The kit of embodiment 146, where the expression level of ZER1 is detected using a nucleic acid probe comprising nucleic acid sequence of SEQ ID NO: 67, complements thereof, or fragments thereof having at least 15 nucleotides.

[0279] Embodiment 152. A kit comprising a probe for detecting the expression level of GNAI2 for determining whether a subject is at risk of lung cancer.

[0280] Embodiment 153. The kit of embodiment 152, where the probe is a nucleic acid probe detecting the nucleic acid sequence of SEQ ID NO: 26.

[0281] Embodiment 154. The kit of embodiment 152, where the probe is a nucleic acid probe comprising nucleic acid sequence of SEQ ID NO: 25, complements thereof, or fragments thereof having at least 15 nucleotides.

[0282] Embodiment 155. The kit of embodiment 152, where the probe is an antibody, or a fragment thereof, that binds to a protein having an amino acid sequence of SEQ ID NO: 27.

[0283] Embodiment 156. The kit of embodiment 152, further comprising one or more probes for detecting the expression level of one or more biomarkers selected from the group consisting of ABCC13, ADCK3, GALNT14, PPM1M, and ZER1.

[0284] Embodiment 157. The kit of embodiment 156, where the expression level of ABCC13 is detected using a nucleic acid probe comprising nucleic acid sequence of SEQ ID NO: 1, complements thereof, or fragments thereof having at least 15 nucleotides.

[0285] Embodiment 158. The kit of embodiment 156, where the expression level of ADCK3 is detected using a nucleic acid probe comprising nucleic acid sequence of SEQ ID NO: 4, complements thereof, or fragments thereof having at least 15 nucleotides.

[0286] Embodiment 159. The kit of embodiment 156, where the expression level of GALNT14 is detected using a nucleic acid probe comprising nucleic acid sequence of SEQ ID NO: 22, complements thereof, or fragments thereof having at least 15 nucleotides.

[0287] Embodiment 160. The kit of embodiment 156, where the expression level of PPM1M is detected using a nucleic acid probe comprising nucleic acid sequence of SEQ ID NO: 91, complements thereof, or fragments thereof having at least 15 nucleotides.

[0288] Embodiment 161. The kit of embodiment 156, where the expression level of ZER1 is detected using a nucleic acid probe comprising nucleic acid sequence of SEQ ID NO: 67, complements thereof, or fragments thereof having at least 15 nucleotides.

[0289] Embodiment 162. A kit comprising a probe for detecting the expression level of PPM1M for determining whether a subject is at risk of lung cancer.

[0290] Embodiment 163. The kit of embodiment 162, where the probe is a nucleic acid probe detecting the nucleic acid sequence of SEQ ID NO: 92.

[0291] Embodiment 164. The kit of embodiment 162, where the probe is a nucleic acid probe comprising nucleic acid sequence of SEQ ID NO: 91, complements thereof, or fragments thereof having at least 15 nucleotides.

[0292] Embodiment 165. The kit of embodiment 162, where the probe is an antibody, or a fragment thereof, that binds to a protein having an amino acid sequence of SEQ ID NO: 93.

[0293] Embodiment 166. The kit of embodiment 162, further comprising one or more probes for detecting the expression level of one or more biomarkers selected from the group consisting of ABCC13, ADCK3, GALNT14, GNAI2, and ZER1.

[0294] Embodiment 167. The kit of embodiment 166, where the expression level of ABCC13 is detected using a nucleic acid probe comprising nucleic acid sequence of SEQ ID NO: 1, complements thereof, or fragments thereof having at least 15 nucleotides.

[0295] Embodiment 168. The kit of embodiment 166, where the expression level of ADCK3 is detected using a nucleic acid probe comprising nucleic acid sequence of SEQ ID NO: 4, complements thereof, or fragments thereof having at least 15 nucleotides.

[0296] Embodiment 169. The kit of embodiment 166, where the expression level of GALNT14 is detected using a nucleic acid probe comprising nucleic acid sequence of SEQ ID NO: 22, complements thereof, or fragments thereof having at least 15 nucleotides.

[0297] Embodiment 170. The kit of embodiment 166, where the expression level of GNAI2 is detected using a nucleic acid probe comprising nucleic acid sequence of SEQ ID NO: 25, complements thereof, or fragments thereof having at least 15 nucleotides.

[0298] Embodiment 171. The kit of embodiment 166, where the expression level of ZER1 is detected using a nucleic acid probe comprising nucleic acid sequence of SEQ ID NO: 67, complements thereof, or fragments thereof having at least 15 nucleotides.

[0299] Embodiment 172. A kit comprising a probe for detecting the expression level of ZER1 for determining whether a subject is at risk of lung cancer.

[0300] Embodiment 173. The kit of embodiment 172, where the probe is a nucleic acid probe detecting the nucleic acid sequence of SEQ ID NO: 68.

[0301] Embodiment 174. The kit of embodiment 172, where the probe is a nucleic acid probe comprising nucleic acid sequence of SEQ ID NO: 67, complements thereof, or fragments thereof having at least 15 nucleotides.

[0302] Embodiment 175. The kit of embodiment 172, where the probe is an antibody, or a fragment thereof, that binds to a protein having an amino acid sequence of SEQ ID NO: 69.

[0303] Embodiment 176. The kit of embodiment 172, further comprising one or more probes for detecting the expression level of one or more biomarkers selected from the group consisting of ABCC13, ADCK3, GALNT14, GNAI2, and PPM1M.

[0304] Embodiment 177. The kit of embodiment 176, where the expression level of ABCC13 is detected using a nucleic acid probe comprising nucleic acid sequence of SEQ ID NO: 1, complements thereof, or fragments thereof having at least 15 nucleotides.

[0305] Embodiment 178. The kit of embodiment 176, where the expression level of ADCK3 is detected using a nucleic acid probe comprising nucleic acid sequence of SEQ ID NO: 4, complements thereof, or fragments thereof having at least 15 nucleotides.

[0306] Embodiment 179. The kit of embodiment 176, where the expression level of GALNT14 is detected using a nucleic acid probe comprising nucleic acid sequence of SEQ ID NO: 22, complements thereof, or fragments thereof having at least 15 nucleotides.

[0307] Embodiment 180. The kit of embodiment 176, where the expression level of GNAI2 is detected using a nucleic acid probe comprising nucleic acid sequence of SEQ ID NO: 25, complements thereof, or fragments thereof having at least 15 nucleotides.

[0308] Embodiment 181. The kit of embodiment 176, where the expression level of PPM1M is detected using a nucleic acid probe comprising nucleic acid sequence of SEQ ID NO: 91, complements thereof, or fragments thereof having at least 15 nucleotides.

[0309] Embodiment 182. The kit of any one of embodiments 122 to 181, further comprising one or more probes for detecting the expression level of one or more biomarkers selected from the group consisting of AMD1, CLCN4, PDCD6IP, PUM1, RBPMS2, and UBAP2.

[0310] Embodiment 183. The kit of embodiment 182, where the expression level of AMD1 is detected using a nucleic acid probe comprising nucleic acid sequence of SEQ ID NO: 7, complements thereof, or fragments thereof having at least 15 nucleotides.

[0311] Embodiment 184. The kit of embodiment 182, where the expression level of CLCN4 is detected using a nucleic acid probe comprising nucleic acid sequence of SEQ ID NO: 73, complements thereof, or fragments thereof having at least 15 nucleotides.

[0312] Embodiment 185. The kit of embodiment 182, where the expression level of PDCD6IP is detected using a nucleic acid probe comprising nucleic acid sequence of SEQ ID NO: 40, complements thereof, or fragments thereof having at least 15 nucleotides.

[0313] Embodiment 186. The kit of embodiment 182, where the expression level of PUM1 is detected using a nucleic acid probe comprising nucleic acid sequence of SEQ ID NO: 94, complements thereof, or fragments thereof having at least 15 nucleotides.

[0314] Embodiment 187. The kit of embodiment 182, where the expression level of RBPMS2 is detected using a nucleic acid probe comprising nucleic acid sequence of SEQ ID NO: 97, complements thereof, or fragments thereof having at least 15 nucleotides.

[0315] Embodiment 188. The kit of embodiment 182, where the expression level of UBAP2 is detected using a nucleic acid probe comprising nucleic acid sequence of SEQ ID NO: 58, complements thereof, or fragments thereof having at least 15 nucleotides.

[0316] Embodiment 189. The kit of any one of embodiments 122 to 188, further comprising one or more probes for a set of biomarkers comprising one or more biomarkers selected from the group consisting of ANKHD1, CIR1, CLK3, CTSH, DNAJB1, EPHX2, GSR, HDAC3, IFI27, INO80C, ITPR1, LGR6, LILRA5, PNPLA6, PSMB4, SCAF4, SLC25A20, SNRPD3, STAMBP, TMEM8A, TPR, VNN1, VPS29, and WDFY3 to establish a biomarker expression profile for the subject.

[0317] Embodiment 190. The kit of embodiment 189, where the probe for ANKHD1 is a nucleic acid probe comprising nucleic acid sequence of SEQ ID NO: 70, complements thereof, or fragments thereof having at least 15 nucleotides.

[0318] Embodiment 191. The kit of embodiment 189, where the probe for CIR1 is a nucleic acid probe comprising nucleic acid sequence of SEQ ID NO: 10, complements thereof, or fragments thereof having at least 15 nucleotides.

[0319] Embodiment 192. The kit of embodiment 189, where the probe for CLK3 is a nucleic acid probe comprising nucleic acid sequence of SEQ ID NO: 13, complements thereof, or fragments thereof having at least 15 nucleotides.

[0320] Embodiment 193. The kit of embodiment 189, where the probe for CTSH is a nucleic acid probe comprising nucleic acid sequence of SEQ ID NO: 76, complements thereof, or fragments thereof having at least 15 nucleotides.

[0321] Embodiment 194. The kit of embodiment 189, where the probe for DNAJB1 is a nucleic acid probe comprising nucleic acid sequence of SEQ ID NO: 16, complements thereof, or fragments thereof having at least 15 nucleotides.

[0322] Embodiment 195. The kit of embodiment 189, where the probe for EPHX2 is a nucleic acid probe comprising nucleic acid sequence of SEQ ID NO: 19, complements thereof, or fragments thereof having at least 15 nucleotides.

[0323] Embodiment 196. The kit of embodiment 189, where the probe for GSR is a nucleic acid probe comprising nucleic acid sequence of SEQ ID NO: 28, complements thereof, or fragments thereof having at least 15 nucleotides.

[0324] Embodiment 197. The kit of embodiment 189, where the probe for HDAC3 is a nucleic acid probe comprising nucleic acid sequence of SEQ ID NO: 79, complements thereof, or fragments thereof having at least 15 nucleotides.

[0325] Embodiment 198. The kit of embodiment 189, where the probe for IFI27 is a nucleic acid probe comprising nucleic acid sequence of SEQ ID NO: 31, complements thereof, or fragments thereof having at least 15 nucleotides.

[0326] Embodiment 199. The kit of embodiment 189, where the probe for INO80C is a nucleic acid probe comprising nucleic acid sequence of SEQ ID NO: 34, complements thereof, or fragments thereof having at least 15 nucleotides.

[0327] Embodiment 200. The kit of embodiment 189, where the probe for ITPR1 is a nucleic acid probe comprising nucleic acid sequence of SEQ ID NO: 82, complements thereof, or fragments thereof having at least 15 nucleotides.

[0328] Embodiment 201. The kit of embodiment 189, where the probe for LGR6 is a nucleic acid probe comprising nucleic acid sequence of SEQ ID NO: 37, complements thereof, or fragments thereof having at least 15 nucleotides.

[0329] Embodiment 202. The kit of embodiment 189, where the probe for LILRA5 is a nucleic acid probe comprising nucleic acid sequence of SEQ ID NO: 85, complements thereof, or fragments thereof having at least 15 nucleotides.

[0330] Embodiment 203. The kit of embodiment 189, where the probe for PNPLA6 is a nucleic acid probe comprising nucleic acid sequence of SEQ ID NO: 88, complements thereof, or fragments thereof having at least 15 nucleotides.

[0331] Embodiment 204. The kit of embodiment 189, where the probe for PSMB4 is a nucleic acid probe comprising nucleic acid sequence of SEQ ID NO: 43, complements thereof, or fragments thereof having at least 15 nucleotides.

[0332] Embodiment 205. The kit of embodiment 189, where the probe for SCAF4 is a nucleic acid probe comprising nucleic acid sequence of SEQ ID NO: 46, complements thereof, or fragments thereof having at least 15 nucleotides.

[0333] Embodiment 206. The kit of embodiment 189, where the probe for SLC25A20 is a nucleic acid probe comprising nucleic acid sequence of SEQ ID NO: 100, complements thereof, or fragments thereof having at least 15 nucleotides.

[0334] Embodiment 207. The kit of embodiment 189, where the probe for SNRPD3 is a nucleic acid probe comprising nucleic acid sequence of SEQ ID NO: 49, complements thereof, or fragments thereof having at least 15 nucleotides.

[0335] Embodiment 208. The kit of embodiment 189, where the probe for STAMBP is a nucleic acid probe comprising nucleic acid sequence of SEQ ID NO: 52, complements thereof, or fragments thereof having at least 15 nucleotides.

[0336] Embodiment 209. The kit of embodiment 189, where the probe for TMEM8A is a nucleic acid probe comprising nucleic acid sequence of SEQ ID NO: 55, complements thereof, or fragments thereof having at least 15 nucleotides.

[0337] Embodiment 210. The kit of embodiment 189, where the probe for TPR is a nucleic acid probe comprising nucleic acid sequence of SEQ ID NO: 103, complements thereof, or fragments thereof having at least 15 nucleotides.

[0338] Embodiment 211. The kit of embodiment 189, where the probe for VNN1 is a nucleic acid probe comprising nucleic acid sequence of SEQ ID NO: 61, complements thereof, or fragments thereof having at least 15 nucleotides.

[0339] Embodiment 212. The kit of embodiment 189, where the probe for VPS29 is a nucleic acid probe comprising nucleic acid sequence of SEQ ID NO: 64, complements thereof, or fragments thereof having at least 15 nucleotides.

[0340] Embodiment 213. The kit of embodiment 189, where the probe for WDFY3 is a nucleic acid probe comprising nucleic acid sequence of SEQ ID NO: 106, complements thereof, or fragments thereof having at least 15 nucleotides.

[0341] Embodiment 214. The kit of embodiment 189, where the set of biomarkers comprises five or more biomarkers.

[0342] Embodiment 215. The kit of embodiment 189, where the set of biomarkers comprises ten or more biomarkers.

[0343] Embodiment 216. The kit of embodiment 189, where the set of biomarkers comprises fifteen or more biomarkers.

[0344] Embodiment 217. The kit of embodiment 189, where the set of biomarkers comprises twenty or more biomarkers.

[0345] Embodiment 218. The kit of any one of embodiments 122 to 217, where the lung cancer is non-small cell lung cancer (NSCLC).

[0346] Embodiment 219. The kit of embodiment 218, where the NSCLC is a stage I NSCLC.

[0347] Embodiment 220. The kit of embodiment 218, where the NSCLC is a stage II NSCLC.

[0348] Embodiment 221. The kit of embodiment 218, where the NSCLC is a mixture of early and late stages and types of NSCLC.

[0349] Embodiment 222. The kit of any one of embodiments 122 to 217, where the lung cancer is lung adenocarcinoma.

[0350] Embodiment 223. The kit of any one of embodiments 122 to 217, where the lung cancer is lung squamous cell carcinoma.

[0351] Embodiment 224. The kit of any one of embodiments 122 to 217, where the lung cancer is a lung carcinoid tumor.

[0352] Embodiment 225. The kit of embodiment 224, where the lung carcinoid tumor is a typical carcinoid tumor of the lung.

[0353] Embodiment 226. The kit of embodiment 224, where the lung carcinoid tumor is an atypical carcinoid tumor of the lung.

[0354] Embodiment 227. The kit of any one of embodiments 122 to 217, where the lung cancer is adenosquamous carcinoma of the lung.

[0355] While the present disclosure has been described with reference to particular embodiments, it will be understood by those skilled in the art that various changes may be made and equivalents may be substituted for elements thereof to adapt to particular situations without departing from the scope of the present disclosure. Therefore, it is intended that the present disclosure not be limited to the particular embodiments disclosed as the best mode contemplated for carrying out the present disclosure, but that the present disclosure will include all embodiments falling within the scope and spirit of the appended claims.

1. A method comprising:
determining whether a subject is at risk of lung cancer by:
obtaining or having obtained non-invasively a biological sample from the subject;
detecting expression level of ABCC13 in the biological sample; and
comparing the expression level of ABCC13 to a reference level to determine if the subject is at risk of lung cancer;
providing a recommendation that the subject is at risk of lung cancer based on said comparing.

2. A method comprising:
determining whether a subject is at risk of lung cancer by:
obtaining or having obtained non-invasively a biological sample from the subject;
detecting expression level of ABCC13 in the biological sample; and
comparing the expression level of ABCC13 to a reference level to determine if the subject is at risk of lung cancer;
if the subject is at risk of lung cancer, obtaining or having obtained a biopsy from the subject to test for lung cancer.

3. The method of claim 1 or 2, further comprising detecting expression level of a second biomarker in the sample to establish a biomarker expression profile for the subject, the second biomarker is selected from the group consisting of: ADCK3, GALNT14, GNAI2, PPM1M, and ZER1, and wherein said comparing further comprises comparing the biomarker expression profile to a reference expression profile to determine if the subject is at risk of lung cancer.

4. The method of claim 1 or 2, further comprising detecting expression level of additional biomarkers in the sample to establish a biomarker expression profile for the subject, the additional biomarkers comprise two biomarkers selected from the group consisting of: ADCK3, GALNT14, GNAI2, PPM1M, and ZER1, and wherein said comparing further comprises comparing the biomarker expression profile to a reference expression profile to determine if the subject is at risk of lung cancer.

5. The method of claim 1 or 2, further comprising detecting expression level of additional biomarkers in the sample to establish a biomarker expression profile for the subject, the additional biomarkers comprise three biomarkers selected from the group consisting of: ADCK3, GALNT14, GNAI2, PPM1M, and ZER1, and wherein said comparing further comprises comparing the biomarker expression profile to a reference expression profile to determine if the subject is at risk of lung cancer.

6. The method of claim 1 or 2, further comprising detecting expression level of additional biomarkers in the sample to establish a biomarker expression profile for the subject, the additional biomarkers comprise four biomarkers selected from the group consisting of: ADCK3, GALNT14, GNAI2, PPM1M, and ZER1, and wherein said comparing further comprises comparing the biomarker expression profile to a reference expression profile to determine if the subject is at risk of lung cancer.

7. The method of claim 1 or 2, further comprising detecting expression level of additional biomarkers in the sample to establish a biomarker expression profile for the subject, the additional biomarkers comprise ADCK3, GALNT14, GNAI2, PPM1M, and ZER1, and wherein said comparing further comprises comparing the biomarker expression profile to a reference expression profile to determine if the subject is at risk of lung cancer.

8. The method of claim 1 or 2, wherein the expression level of ABCC13 is detected using a nucleic acid probe that binds to the nucleic acid sequence of SEQ ID NO: 2.

9. The method of claim 1 or 2, wherein the expression level of ABCC13 is detected using a nucleic acid probe comprising nucleic acid sequence of SEQ ID NO: 1, complements thereof, or fragments thereof having at least 15 nucleotides.

10. The method of claim 1 or 2, wherein the expression level of ABCC13 is detected using an antibody, or a fragment thereof, that binds to a protein having an amino acid sequence of SEQ ID NO: 3.

11. A method comprising:
determining whether a subject is at risk of lung cancer by:
obtaining or having obtained non-invasively a biological sample from the subject;
detecting expression level of ADCK3 in the biological sample; and
comparing the expression level of ADCK3 to a reference level to determine if the subject is at risk of lung cancer;
providing a recommendation that the subject is at risk of lung cancer based on said comparing.

12. A method comprising:
determining whether a subject is at risk of lung cancer by:
obtaining or having obtained non-invasively a biological sample from the subject;
detecting expression level of ADCK3 in the biological sample; and
comparing the expression level of ADCK3 to a reference level to determine if the subject is at risk of lung cancer;
if the subject is at risk of lung cancer, obtaining or having obtained a biopsy from the subject to test for lung cancer.

13. The method of claim 11 or 12, further comprising detecting expression level of a second biomarker in the sample to establish a biomarker expression profile for the subject, the second biomarker is selected from the group consisting of: ABCC13, GALNT14, GNAI2, PPM1M, and ZER1, and wherein said comparing further comprises comparing the biomarker expression profile to a reference expression profile to determine if the subject is at risk of lung cancer.

14. The method of claim 11 or 12, further comprising detecting expression level of additional biomarkers in the sample to establish a biomarker expression profile for the subject, the additional biomarkers comprise two biomarkers selected from the group consisting of: ABCC13, GALNT14, GNAI2, PPM1M, and ZER1, and wherein said comparing further comprises comparing the biomarker expression profile to a reference expression profile to determine if the subject is at risk of lung cancer.

15. The method of claim 11 or 12, further comprising detecting expression level of additional biomarkers in the sample to establish a biomarker expression profile for the subject, the additional biomarkers comprise three biomarkers selected from the group consisting of: ABCC13, GALNT14, GNAI2, PPM1M, and ZER1, and wherein said comparing further comprises comparing the biomarker expression profile to a reference expression profile to determine if the subject is at risk of lung cancer.

16. The method of claim 11 or 12, further comprising detecting expression level of additional biomarkers in the sample to establish a biomarker expression profile for the subject, the additional biomarkers comprise four biomarkers selected from the group consisting of: ABCC13, GALNT14, GNAI2, PPM1M, and ZER1, and wherein said comparing further comprises comparing the biomarker expression profile to a reference expression profile to determine if the subject is at risk of lung cancer.

17. The method of claim 11 or 12, further comprising detecting expression level of additional biomarkers in the sample to establish a biomarker expression profile for the subject, the additional biomarkers comprise ABCC13, GALNT14, GNAI2, PPM1M, and ZER1, and wherein said comparing further comprises comparing the biomarker expression profile to a reference expression profile to determine if the subject is at risk of lung cancer.

18. The method of claim 11 or 12, wherein the expression level of ADCK3 is detected using a nucleic acid probe that binds to the nucleic acid sequence of SEQ ID NO: 5.

19. The method of claim 11 or 12, wherein the expression level of ADCK3 is detected using a nucleic acid probe comprising nucleic acid sequence of SEQ ID NO: 4, complements thereof, or fragments thereof having at least 15 nucleotides.

20. The method of claim 11 or 12, wherein the expression level of ADCK3 is detected using an antibody, or a fragment thereof, that binds to a protein having an amino acid sequence of SEQ ID NO: 6.

21. A method comprising:
determining whether a subject is at risk of lung cancer by:
obtaining or having obtained non-invasively a biological sample from the subject;
detecting expression level of GALNT14 in the biological sample; and
comparing the expression level of GALNT14 to a reference level to determine if the subject is at risk of lung cancer;
providing a recommendation that the subject is at risk of lung cancer based on said comparing.

22. A method comprising:
determining whether a subject is at risk of lung cancer by:
obtaining or having obtained non-invasively a biological sample from the subject;
detecting expression level of GALNT14 in the biological sample; and
comparing the expression level of GALNT14 to a reference level to determine if the subject is at risk of lung cancer;
if the subject is at risk of lung cancer, obtaining or having obtained a biopsy from the subject to test for lung cancer.

23. The method of claim 21 or 22, further comprising detecting expression level of a second biomarker in the sample to establish a biomarker expression profile for the subject, the second biomarker is selected from the group consisting of: ABCC13, ADCK3, GNAI2, PPM1M, and ZER1, and wherein said comparing further comprises comparing the biomarker expression profile to a reference expression profile to determine if the subject is at risk of lung cancer.

24. The method of claim 21 or 22, further comprising detecting expression level of additional biomarkers in the sample to establish a biomarker expression profile for the subject, the additional biomarkers comprise two biomarkers selected from the group consisting of: ABCC13, ADCK3, GNAI2, PPM1M, and ZER1, and wherein said comparing further comprises comparing the biomarker expression profile to a reference expression profile to determine if the subject is at risk of lung cancer.

25. The method of claim 21 or 22, further comprising detecting expression level of additional biomarkers in the sample to establish a biomarker expression profile for the subject, the additional biomarkers comprise three biomarkers selected from the group consisting of: ABCC13, ADCK3, GNAI2, PPM1M, and ZER1, and wherein said comparing further comprises comparing the biomarker expression profile to a reference expression profile to determine if the subject is at risk of lung cancer.

26. The method of claim 21 or 22, further comprising detecting expression level of additional biomarkers in the sample to establish a biomarker expression profile for the subject, the additional biomarkers comprise four biomarkers selected from the group consisting of: ABCC13, ADCK3, GNAI2, PPM1M, and ZER1, and wherein said comparing further comprises comparing the biomarker expression profile to a reference expression profile to determine if the subject is at risk of lung cancer.

27. The method of claim 21 or 22, further comprising detecting expression level of additional biomarkers in the sample to establish a biomarker expression profile for the subject, the additional biomarkers comprise ABCC13, ADCK3, GNAI2, PPM1M, and ZER1, and wherein said comparing further comprises comparing the biomarker expression profile to a reference expression profile to determine if the subject is at risk of lung cancer.

28. The method of claim 21 or 22, wherein the expression level of GALNT14 is detected using a nucleic acid probe that binds to the nucleic acid sequence of SEQ ID NO: 23.

29. The method of claim 21 or 22, wherein the expression level of GALNT14 is detected using a nucleic acid probe comprising nucleic acid sequence of SEQ ID NO: 22, complements thereof, or fragments thereof having at least 15 nucleotides.

30. The method of claim 21 or 22, wherein the expression level of GALNT14 is detected using an antibody, or a fragment thereof, that binds to a protein having an amino acid sequence of SEQ ID NO: 24.

31. A method comprising:
determining whether a subject is at risk of lung cancer by:
obtaining or having obtained non-invasively a biological sample from the subject;
detecting expression level of GNAI2 in the biological sample; and
comparing the expression level of GNAI2 to a reference level to determine if the subject is at risk of lung cancer;
providing a recommendation that the subject is at risk of lung cancer based on said comparing.

32. A method comprising:
determining whether a subject is at risk of lung cancer by:
obtaining or having obtained non-invasively a biological sample from the subject;
detecting expression level of GNAI2 in the biological sample; and
comparing the expression level of GNAI2 to a reference level to determine if the subject is at risk of lung cancer;
if the subject is at risk of lung cancer, obtaining or having obtained a biopsy from the subject to test for lung cancer.

33. The method of claim 31 or 32, further comprising detecting expression level of a second biomarker in the sample to establish a biomarker expression profile for the subject, the second biomarker is selected from the group consisting of: ABCC13, ADCK3, GALNT14, PPM1M, and ZER1, and wherein said comparing further comprises comparing the biomarker expression profile to a reference expression profile to determine if the subject is at risk of lung cancer.

34. The method of claim 31 or 32, further comprising detecting expression level of additional biomarkers in the sample to establish a biomarker expression profile for the subject, the additional biomarkers comprise two biomarkers selected from the group consisting of: ABCC13, ADCK3, GALNT14, PPM1M, and ZER1, and wherein said comparing further comprises comparing the biomarker expression profile to a reference expression profile to determine if the subject is at risk of lung cancer.

35. The method of claim 31 or 32, further comprising detecting expression level of additional biomarkers in the sample to establish a biomarker expression profile for the subject, the additional biomarkers comprise three biomarkers selected from the group consisting of: ABCC13, ADCK3, GALNT14, PPM1M, and ZER1, and wherein said comparing further comprises comparing the biomarker expression profile to a reference expression profile to determine if the subject is at risk of lung cancer.

36. The method of claim 31 or 32, further comprising detecting expression level of additional biomarkers in the sample to establish a biomarker expression profile for the subject, the additional biomarkers comprise four biomarkers selected from the group consisting of: ABCC13, ADCK3, GALNT14, PPM1M, and ZER1, and wherein said comparing further comprises comparing the biomarker expression profile to a reference expression profile to determine if the subject is at risk of lung cancer.

37. The method of claim 31 or 32, further comprising detecting expression level of additional biomarkers in the sample to establish a biomarker expression profile for the subject, the additional biomarkers comprise ABCC13, ADCK3, GALNT14, PPM1M, and ZER1, and wherein said comparing further comprises comparing the biomarker expression profile to a reference expression profile to determine if the subject is at risk of lung cancer.

38. The method of claim 31 or 32, wherein the expression level of GNAI2 is detected using a nucleic acid probe that binds to the nucleic acid sequence of SEQ ID NO: 26.

39. The method of claim 31 or 32, wherein the expression level of GNAI2 is detected using a nucleic acid probe comprising nucleic acid sequence of SEQ ID NO: 25, complements thereof, or fragments thereof having at least 15 nucleotides.

40. The method of claim 31 or 32, wherein the expression level of GNAI2 is detected using an antibody, or a fragment thereof, that binds to a protein having an amino acid sequence of SEQ ID NO: 27.

41. A method comprising:
determining whether a subject is at risk of lung cancer by:
obtaining or having obtained non-invasively a biological sample from the subject;
detecting expression level of PPM1M in the biological sample; and
comparing the expression level of PPM1M to a reference level to determine if the subject is at risk of lung cancer;
providing a recommendation that the subject is at risk of lung cancer based on said comparing.

42. A method comprising:
determining whether a subject is at risk of lung cancer by:
obtaining or having obtained non-invasively a biological sample from the subject;
detecting expression level of PPM1M in the biological sample; and
comparing the expression level of PPM1M to a reference level to determine if the subject is at risk of lung cancer;
if the subject is at risk of lung cancer, obtaining or having obtained a biopsy from the subject to test for lung cancer.

43. The method of claim 41 or 42, further comprising detecting expression level of a second biomarker in the sample to establish a biomarker expression profile for the subject, the second biomarker is selected from the group consisting of: ABCC13, ADCK3, GALNT14, GNAI2, and ZER1, and wherein said comparing further comprises comparing the biomarker expression profile to a reference expression profile to determine if the subject is at risk of lung cancer.

44. The method of claim 41 or 42, further comprising detecting expression level of additional biomarkers in the sample to establish a biomarker expression profile for the subject, the additional biomarkers comprise two biomarkers selected from the group consisting of: ABCC13, ADCK3, GALNT14, GNAI2, and ZER1, and wherein said comparing further comprises comparing the biomarker expression profile to a reference expression profile to determine if the subject is at risk of lung cancer.

45. The method of claim 41 or 42, further comprising detecting expression level of additional biomarkers in the sample to establish a biomarker expression profile for the subject, the additional biomarkers comprise three biomarkers selected from the group consisting of: ABCC13, ADCK3, GALNT14, GNAI2, and ZER1, and wherein said comparing further comprises comparing the biomarker expression profile to a reference expression profile to determine if the subject is at risk of lung cancer.

46. The method of claim 41 or 42, further comprising detecting expression level of additional biomarkers in the sample to establish a biomarker expression profile for the subject, the additional biomarkers comprise four biomarkers selected from the group consisting of: ABCC13, ADCK3, GALNT14, GNAI2, and ZER1, and wherein said comparing further comprises comparing the biomarker expression profile to a reference expression profile to determine if the subject is at risk of lung cancer.

47. The method of claim 41 or 42, further comprising detecting expression level of additional biomarkers in the sample to establish a biomarker expression profile for the subject, the additional biomarkers comprise ABCC13, ADCK3, GALNT14, GNAI2, and ZER1, and wherein said comparing further comprises comparing the biomarker expression profile to a reference expression profile to determine if the subject is at risk of lung cancer.

48. The method of claim 41 or 42, wherein the expression level of PPM1M is detected using a nucleic acid probe that binds to the nucleic acid sequence of SEQ ID NO: 92.

49. The method of claim 41 or 42, wherein the expression level of PPM1M is detected using a nucleic acid probe comprising nucleic acid sequence of SEQ ID NO: 91, complements thereof, or fragments thereof having at least 15 nucleotides.

50. The method of claim 41 or 42, wherein the expression level of PPM1M is detected using an antibody, or a fragment thereof, that binds to a protein having an amino acid sequence of SEQ ID NO: 93.

51. A method comprising:
determining whether a subject is at risk of lung cancer by:
obtaining or having obtained non-invasively a biological sample from the subject;
detecting expression level of ZER1 in the biological sample; and
comparing the expression level of ZER1 to a reference level to determine if the subject is at risk of lung cancer;
providing a recommendation that the subject is at risk of lung cancer based on said comparing.

52. A method comprising:
determining whether a subject is at risk of lung cancer by:
obtaining or having obtained non-invasively a biological sample from the subject;
detecting expression level of ZER1 in the biological sample; and
comparing the expression level of ZER1 to a reference level to determine if the subject is at risk of lung cancer;
if the subject is at risk of lung cancer, obtaining or having obtained a biopsy from the subject to test for lung cancer.

53. The method of claim 51 or 52, further comprising detecting expression level of a second biomarker in the sample to establish a biomarker expression profile for the subject, the second biomarker is selected from the group consisting of: ABCC13, ADCK3, GALNT14, GNAI2, and PPM1M, and wherein said comparing further comprises comparing the biomarker expression profile to a reference expression profile to determine if the subject is at risk of lung cancer.

54. The method of claim 51 or 52, further comprising detecting expression level of additional biomarkers in the sample to establish a biomarker expression profile for the subject, the additional biomarkers comprise two biomarkers selected from the group consisting of: ABCC13, ADCK3, GALNT14, GNAI2, and PPM1M, and wherein said comparing further comprises comparing the biomarker expression profile to a reference expression profile to determine if the subject is at risk of lung cancer.

55. The method of claim 51 or 52, further comprising detecting expression level of additional biomarkers in the sample to establish a biomarker expression profile for the subject, the additional biomarkers comprise three biomarkers selected from the group consisting of: ABCC13, ADCK3, GALNT14, GNAI2, and PPM1M, and wherein said comparing further comprises comparing the biomarker expression profile to a reference expression profile to determine if the subject is at risk of lung cancer.

56. The method of claim 51 or 52, further comprising detecting expression level of additional biomarkers in the sample to establish a biomarker expression profile for the subject, the additional biomarkers comprise four biomarkers selected from the group consisting of: ABCC13, ADCK3, GALNT14, GNAI2, and PPM1M, and wherein said comparing further comprises comparing the biomarker expression profile to a reference expression profile to determine if the subject is at risk of lung cancer.

57. The method of claim 51 or 52, further comprising detecting expression level of additional biomarkers in the sample to establish a biomarker expression profile for the subject, the additional biomarkers comprise ABCC13, ADCK3, GALNT14, GNAI2, and PPM1M, and wherein said comparing further comprises comparing the biomarker expression profile to a reference expression profile to determine if the subject is at risk of lung cancer.

58. The method of claim 51 or 52, wherein the expression level of ZER1 is detected using a nucleic acid probe that binds to the nucleic acid sequence of SEQ ID NO: 68.

59. The method of claim 51 or 52, wherein the expression level of ZER1 is detected using a nucleic acid probe comprising nucleic acid sequence of SEQ ID NO: 67, complements thereof, or fragments thereof having at least 15 nucleotides.

60. The method of claim 51 or 52, wherein the expression level of ZER1 is detected using an antibody, or a fragment thereof, that binds to a protein having an amino acid sequence of SEQ ID NO: 69.

61. The method of any one of claims 1 to 60, further comprising detecting expression level of one or more biomarkers selected from the group consisting of AMD1, CLCN4, PDCD6IP, PUM1, RBPMS2, and UBAP2 to establish a biomarker expression profile for the subject.

62. The method of any one of claims 1 to 60, further comprising detecting expression level of two or more biomarkers selected from the group consisting of AMD1, CLCN4, PDCD6IP, PUM1, RBPMS2, and UBAP2 to establish a biomarker expression profile for the subject.

63. The method of any one of claims 1 to 60, further comprising detecting expression level of three or more biomarkers selected from the group consisting of AMD1, CLCN4, PDCD6IP, PUM1, RBPMS2, and UBAP2 to establish a biomarker expression profile for the subject.

64. The method of any one of claims 1 to 60, further comprising detecting expression level of four or more biomarkers selected from the group consisting of AMD1, CLCN4, PDCD6IP, PUM1, RBPMS2, and UBAP2 to establish a biomarker expression profile for the subject.

65. The method of any one of claims 1 to 60, further comprising detecting expression level of five or more biomarkers selected from the group consisting of AMD1, CLCN4, PDCD6IP, PUM1, RBPMS2, and UBAP2 to establish a biomarker expression profile for the subject.

66. The method of any one of claims 1 to 60, further comprising detecting expression level of AMD1, CLCN4, PDCD6IP, PUM1, RBPMS2, and UBAP2 to establish a biomarker expression profile for the subject.

67. The method of any one of claims 61 to 66, wherein the expression level of AMD1 is detected using a nucleic acid probe comprising nucleic acid sequence of SEQ ID NO: 7, complements thereof, or fragments thereof having at least 15 nucleotides.

68. The method of any one of claims 61 to 66, wherein the expression level of CLCN4 is detected using a nucleic acid probe comprising nucleic acid sequence of SEQ ID NO: 73, complements thereof, or fragments thereof having at least 15 nucleotides.

69. The method of any one of claims 61 to 66, wherein the expression level of PDCD6IP is detected using a nucleic acid probe comprising nucleic acid sequence of SEQ ID NO: 40, complements thereof, or fragments thereof having at least 15 nucleotides.

70. The method of any one of claims 61 to 66, wherein the expression level of PUM1 is detected using a nucleic acid probe comprising nucleic acid sequence of SEQ ID NO: 94, complements thereof, or fragments thereof having at least 15 nucleotides.

71. The method of any one of claims 61 to 66, wherein the expression level of RBPMS2 is detected using a nucleic acid probe comprising nucleic acid sequence of SEQ ID NO: 97, complements thereof, or fragments thereof having at least 15 nucleotides.

72. The method of any one of claims 61 to 66, wherein the expression level of UBAP2 is detected using a nucleic acid probe comprising nucleic acid sequence of SEQ ID NO: 58, complements thereof, or fragments thereof having at least 15 nucleotides.

73. The method of any one of claims 1 to 72, further comprising detecting expression level of a set of biomarkers comprising one or more biomarkers selected from the group consisting of ANKHD1, CIR1, CLK3, CTSH, DNAJB1, EPHX2, GSR, HDAC3, IFI27, INO80C, ITPR1, LGR6, LILRA5, PNPLA6, PSMB4, SCAF4, SLC25A20, SNRPD3, STAMBP, TMEM8A, TPR, VNN1, VPS29, and WDFY3 to establish a biomarker expression profile for the subject.

74. The method of claim 73, wherein the set of biomarkers comprises five or more biomarkers.

75. The method of claim 73, wherein the set of biomarkers comprises ten or more biomarkers.

76. The method of claim 73, wherein the set of biomarkers comprises fifteen or more biomarkers.

77. The method of claim 73, wherein the set of biomarkers comprises twenty or more biomarkers.

78. The method of claim 73, wherein the set of biomarkers comprises all the biomarkers.

79. The method of any one of claims 73 to 78, wherein the expression level of ANKHD1 is detected using a nucleic acid probe comprising nucleic acid sequence of SEQ ID NO: 70, complements thereof, or fragments thereof having at least 15 nucleotides.

80. The method of any one of claims 73 to 78, wherein the expression level of CIR1 is detected using a nucleic acid probe comprising nucleic acid sequence of SEQ ID NO: 10, complements thereof, or fragments thereof having at least 15 nucleotides.

81. The method of any one of claims 73 to 78, wherein the expression level of CLK3 is detected using a nucleic acid probe comprising nucleic acid sequence of SEQ ID NO: 13, complements thereof, or fragments thereof having at least 15 nucleotides.

82. The method of any one of claims 73 to 78, wherein the expression level of CTSH is detected using a nucleic acid probe comprising nucleic acid sequence of SEQ ID NO: 76, complements thereof, or fragments thereof having at least 15 nucleotides.

83. The method of any one of claims 73 to 78, wherein the expression level of DNAJB1 is detected using a nucleic acid probe comprising nucleic acid sequence of SEQ ID NO: 16, complements thereof, or fragments thereof having at least 15 nucleotides.

84. The method of any one of claims 73 to 78, wherein the expression level of EPHX2 is detected using a nucleic acid probe comprising nucleic acid sequence of SEQ ID NO: 19, complements thereof, or fragments thereof having at least 15 nucleotides.

85. The method of any one of claims 73 to 78, wherein the expression level of GSR is detected using a nucleic acid probe comprising nucleic acid sequence of SEQ ID NO: 28, complements thereof, or fragments thereof having at least 15 nucleotides.

86. The method of any one of claims 73 to 78, wherein the expression level of HDAC3 is detected using a nucleic acid probe comprising nucleic acid sequence of SEQ ID NO: 79, complements thereof, or fragments thereof having at least 15 nucleotides.

87. The method of any one of claims 73 to 78, wherein the expression level of IFI27 is detected using a nucleic acid probe comprising nucleic acid sequence of SEQ ID NO: 31, complements thereof, or fragments thereof having at least 15 nucleotides.

88. The method of any one of claims 73 to 78, wherein the expression level of INO80C is detected using a nucleic acid probe comprising nucleic acid sequence of SEQ ID NO: 34, complements thereof, or fragments thereof having at least 15 nucleotides.

89. The method of any one of claims 73 to 78, wherein the expression level of ITPR1 is detected using a nucleic acid probe comprising nucleic acid sequence of SEQ ID NO: 82, complements thereof, or fragments thereof having at least 15 nucleotides.

90. The method of any one of claims 73 to 78, wherein the expression level of LGR6 is detected using a nucleic acid probe comprising nucleic acid sequence of SEQ ID NO: 37, complements thereof, or fragments thereof having at least 15 nucleotides.

91. The method of any one of claims 73 to 78, wherein the expression level of LILRA5 is detected using a nucleic acid probe comprising nucleic acid sequence of SEQ ID NO: 85, complements thereof, or fragments thereof having at least 15 nucleotides.

92. The method of any one of claims 73 to 78, wherein the expression level of PNPLA6 is detected using a nucleic acid probe comprising nucleic acid sequence of SEQ ID NO: 88, complements thereof, or fragments thereof having at least 15 nucleotides.

93. The method of any one of claims 73 to 78, wherein the expression level of PSMB4 is detected using a nucleic acid probe comprising nucleic acid sequence of SEQ ID NO: 43, complements thereof, or fragments thereof having at least 15 nucleotides.

94. The method of any one of claims 73 to 78, wherein the expression level of SCAF4 is detected using a nucleic acid probe comprising nucleic acid sequence of SEQ ID NO: 46, complements thereof, or fragments thereof having at least 15 nucleotides.

95. The method of any one of claims 73 to 78, wherein the expression level of SLC25A20 is detected using a nucleic acid probe comprising nucleic acid sequence of SEQ ID NO: 100, complements thereof, or fragments thereof having at least 15 nucleotides.

96. The method of any one of claims 73 to 78, wherein the expression level of SNRPD3 is detected using a nucleic acid probe comprising nucleic acid sequence of SEQ ID NO: 49, complements thereof, or fragments thereof having at least 15 nucleotides.

97. The method of any one of claims 73 to 78, wherein the expression level of STAMBP is detected using a nucleic acid probe comprising nucleic acid sequence of SEQ ID NO: 52, complements thereof, or fragments thereof having at least 15 nucleotides.

98. The method of any one of claims 73 to 78, wherein the expression level of TMEM8A is detected using a nucleic acid probe comprising nucleic acid sequence of SEQ ID NO: 55, complements thereof, or fragments thereof having at least 15 nucleotides.

99. The method of any one of claims 73 to 78, wherein the expression level of TPR is detected using a nucleic acid probe comprising nucleic acid sequence of SEQ ID NO: 103, complements thereof, or fragments thereof having at least 15 nucleotides.

100. The method of any one of claims 73 to 78, wherein the expression level of VNN1 is detected using a nucleic acid probe comprising nucleic acid sequence of SEQ ID NO: 61, complements thereof, or fragments thereof having at least 15 nucleotides.

101. The method of any one of claims 73 to 78, wherein the expression level of VPS29 is detected using a nucleic acid probe comprising nucleic acid sequence of SEQ ID NO: 64, complements thereof, or fragments thereof having at least 15 nucleotides.

102. The method of any one of claims 73 to 78, wherein the expression level of WDFY3 is detected using a nucleic acid probe comprising nucleic acid sequence of SEQ ID NO: 106, complements thereof, or fragments thereof having at least 15 nucleotides.

103. The method of any one of claims 1 to 102, wherein the biological sample is blood.

104. The method of any one of claims 1 to 103, wherein the subject is a human.

105. The method of any one of claims 1 to 104, wherein the subject has one or more lung nodules suspect of being cancerous.

106. The method of claim 105, wherein the one or more lung nodules have diameters in the range of 0.8 cm to 2 cm.

107. The method of any one of claims 1 to 106, wherein the lung cancer is non-small cell lung cancer (NSCLC).

108. The method of claim 107, wherein the NSCLC is a stage I NSCLC.

109. The method of claim 107, wherein the NSCLC is a stage II NSCLC.

110. The method of claim 107, wherein the NSCLC is a mixture of early and late stages and types of NSCLC.

111. The method of any one of claims 1 to 106, wherein the lung cancer is lung adenocarcinoma.

112. The method of any one of claims 1 to 106, wherein the lung cancer is lung squamous cell carcinoma.

113. The method of any one of claims 1 to 106, wherein the lung cancer is a lung carcinoid tumor.

114. The method of claim 113, wherein the lung carcinoid tumor is a typical carcinoid tumor of the lung.

115. The method of claim 113, wherein the lung carcinoid tumor is an atypical carcinoid tumor of the lung.

116. The method of any one of claims 1 to 106, wherein the lung cancer is adenosquamous carcinoma of the lung.

117. The method of any one of claims 2, 12, 22, 32, 42, and 52, further comprising the step of confirming or having confirmed that the subject has lung cancer based on the biopsy.

118. The method of claim 117, further comprising administering or having administered a lung cancer therapy to the subject.

119. The method of claim 118, wherein the lung cancer therapy is selected from the group consisting of surgery, chemotherapy, radiation therapy, targeted therapy and immunotherapy.

120. The method of claim 119, wherein the chemotherapy is selected from the group consisting of cisplatin or carboplatin plus docetaxel, gemcitabine, paclitaxel, vinorelbine, and pemetrexed, or a combination thereof.

121. The method of claim 119, wherein the targeted therapy is selected from the group consisting of Erlotinib, Afatinib, Gefitinib, Bevacizumab, Crizotinib, and Ceritinib.

122. A kit comprising a probe for detecting the expression level of ABCC13 for determining whether a subject is at risk of lung cancer.

123. The kit of claim 122, wherein the probe is a nucleic acid probe detecting the nucleic acid sequence of SEQ ID NO: 2.

124. The kit of claim 122, wherein the probe is a nucleic acid probe comprising nucleic acid sequence of SEQ ID NO: 1, complements thereof, or fragments thereof having at least 15 nucleotides.

125. The kit of claim 122, wherein the probe is an antibody, or a fragment thereof, that binds to a protein having an amino acid sequence of SEQ ID NO: 3.

126. The kit of claim 122, further comprising one or more probes for detecting the expression level of one or more biomarkers selected from the group consisting of ADCK3, GALNT14, GNAI2, PPM1M, and ZER1.

127. The kit of claim 126, wherein the expression level of ADCK3 is detected using a nucleic acid probe comprising nucleic acid sequence of SEQ ID NO: 4, complements thereof, or fragments thereof having at least 15 nucleotides.

128. The kit of claim 126, wherein the expression level of GALNT14 is detected using a nucleic acid probe comprising nucleic acid sequence of SEQ ID NO: 22, complements thereof, or fragments thereof having at least 15 nucleotides.

129. The kit of claim 126, wherein the expression level of GNAI2 is detected using a nucleic acid probe comprising nucleic acid sequence of SEQ ID NO: 25, complements thereof, or fragments thereof having at least 15 nucleotides.

130. The kit of claim 126, wherein the expression level of PPM1M is detected using a nucleic acid probe comprising nucleic acid sequence of SEQ ID NO: 91, complements thereof, or fragments thereof having at least 15 nucleotides.

131. The kit of claim 126, wherein the expression level of ZER1 is detected using a nucleic acid probe comprising nucleic acid sequence of SEQ ID NO: 67, complements thereof, or fragments thereof having at least 15 nucleotides.

132. A kit comprising a probe for detecting the expression level of ADCK3 for determining whether a subject is at risk of lung cancer.

133. The kit of claim 132, wherein the probe is a nucleic acid probe detecting the nucleic acid sequence of SEQ ID NO: 5.

134. The kit of claim 132, wherein the probe is a nucleic acid probe comprising nucleic acid sequence of SEQ ID NO: 4, complements thereof, or fragments thereof having at least 15 nucleotides.

135. The kit of claim 132, wherein the probe is an antibody, or a fragment thereof, that binds to a protein having an amino acid sequence of SEQ ID NO: 6.

136. The kit of claim 132, further comprising one or more probes for detecting the expression level of one or more biomarkers selected from the group consisting of ABCC13, GALNT14, GNAI2, PPM1M, and ZER1.

137. The kit of claim 136, wherein the expression level of ABCC13 is detected using a nucleic acid probe comprising nucleic acid sequence of SEQ ID NO: 1, complements thereof, or fragments thereof having at least 15 nucleotides.

138. The kit of claim 136, wherein the expression level of GALNT14 is detected using a nucleic acid probe comprising nucleic acid sequence of SEQ ID NO: 22, complements thereof, or fragments thereof having at least 15 nucleotides.

139. The kit of claim 136, wherein the expression level of GNAI2 is detected using a nucleic acid probe comprising nucleic acid sequence of SEQ ID NO: 25, complements thereof, or fragments thereof having at least 15 nucleotides.

140. The kit of claim 136, wherein the expression level of PPM1M is detected using a nucleic acid probe comprising nucleic acid sequence of SEQ ID NO: 91, complements thereof, or fragments thereof having at least 15 nucleotides.

141. The kit of claim 136, wherein the expression level of ZER1 is detected using a nucleic acid probe comprising nucleic acid sequence of SEQ ID NO: 67, complements thereof, or fragments thereof having at least 15 nucleotides.

142. A kit comprising a probe for detecting the expression level of GALNT14 for determining whether a subject is at risk of lung cancer.

143. The kit of claim 142, wherein the probe is a nucleic acid probe detecting the nucleic acid sequence of SEQ ID NO: 23.

144. The kit of claim 142, wherein the probe is a nucleic acid probe comprising nucleic acid sequence of SEQ ID NO: 22, complements thereof, or fragments thereof having at least 15 nucleotides.

145. The kit of claim 142, wherein the probe is an antibody, or a fragment thereof, that binds to a protein having an amino acid sequence of SEQ ID NO: 24.

146. The kit of claim 142, further comprising one or more probes for detecting the expression level of one or more biomarkers selected from the group consisting of ABCC13, ADCK3, GNAI2, PPM1M, and ZER1.

147. The kit of claim 146, wherein the expression level of ABCC13 is detected using a nucleic acid probe comprising nucleic acid sequence of SEQ ID NO: 1, complements thereof, or fragments thereof having at least 15 nucleotides.

148. The kit of claim 146, wherein the expression level of ADCK3 is detected using a nucleic acid probe comprising nucleic acid sequence of SEQ ID NO: 4, complements thereof, or fragments thereof having at least 15 nucleotides.

149. The kit of claim 146, wherein the expression level of GNAI2 is detected using a nucleic acid probe comprising nucleic acid sequence of SEQ ID NO: 25, complements thereof, or fragments thereof having at least 15 nucleotides.

150. The kit of claim 146, wherein the expression level of PPM1M is detected using a nucleic acid probe comprising nucleic acid sequence of SEQ ID NO: 91, complements thereof, or fragments thereof having at least 15 nucleotides.

151. The kit of claim 146, wherein the expression level of ZER1 is detected using a nucleic acid probe comprising nucleic acid sequence of SEQ ID NO: 67, complements thereof, or fragments thereof having at least 15 nucleotides.

152. A kit comprising a probe for detecting the expression level of GNAI2 for determining whether a subject is at risk of lung cancer.

153. The kit of claim 152, wherein the probe is a nucleic acid probe detecting the nucleic acid sequence of SEQ ID NO: 26.

154. The kit of claim 152, wherein the probe is a nucleic acid probe comprising nucleic acid sequence of SEQ ID NO: 25, complements thereof, or fragments thereof having at least 15 nucleotides.

155. The kit of claim 152, wherein the probe is an antibody, or a fragment thereof, that binds to a protein having an amino acid sequence of SEQ ID NO: 27.

156. The kit of claim 152, further comprising one or more probes for detecting the expression level of one or more biomarkers selected from the group consisting of ABCC13, ADCK3, GALNT14, PPM1M, and ZER1.

157. The kit of claim 156, wherein the expression level of ABCC13 is detected using a nucleic acid probe comprising nucleic acid sequence of SEQ ID NO: 1, complements thereof, or fragments thereof having at least 15 nucleotides.

158. The kit of claim 156, wherein the expression level of ADCK3 is detected using a nucleic acid probe comprising nucleic acid sequence of SEQ ID NO: 4, complements thereof, or fragments thereof having at least 15 nucleotides.

159. The kit of claim 156, wherein the expression level of GALNT14 is detected using a nucleic acid probe comprising nucleic acid sequence of SEQ ID NO: 22, complements thereof, or fragments thereof having at least 15 nucleotides.

160. The kit of claim 156, wherein the expression level of PPM1M is detected using a nucleic acid probe comprising nucleic acid sequence of SEQ ID NO: 91, complements thereof, or fragments thereof having at least 15 nucleotides.

161. The kit of claim 156, wherein the expression level of ZER1 is detected using a nucleic acid probe comprising nucleic acid sequence of SEQ ID NO: 67, complements thereof, or fragments thereof having at least 15 nucleotides.

162. A kit comprising a probe for detecting the expression level of PPM1M for determining whether a subject is at risk of lung cancer.

163. The kit of claim 162, wherein the probe is a nucleic acid probe detecting the nucleic acid sequence of SEQ ID NO: 92.

164. The kit of claim 162, wherein the probe is a nucleic acid probe comprising nucleic acid sequence of SEQ ID NO: 91, complements thereof, or fragments thereof having at least 15 nucleotides.

165. The kit of claim 162, wherein the probe is an antibody, or a fragment thereof, that binds to a protein having an amino acid sequence of SEQ ID NO: 93.

166. The kit of claim 162, further comprising one or more probes for detecting the expression level of one or more biomarkers selected from the group consisting of ABCC13, ADCK3, GALNT14, GNAI2, and ZER1.

167. The kit of claim 166, wherein the expression level of ABCC13 is detected using a nucleic acid probe comprising nucleic acid sequence of SEQ ID NO: 1, complements thereof, or fragments thereof having at least 15 nucleotides.

168. The kit of claim 166, wherein the expression level of ADCK3 is detected using a nucleic acid probe comprising nucleic acid sequence of SEQ ID NO: 4, complements thereof, or fragments thereof having at least 15 nucleotides.

169. The kit of claim 166, wherein the expression level of GALNT14 is detected using a nucleic acid probe comprising nucleic acid sequence of SEQ ID NO: 22, complements thereof, or fragments thereof having at least 15 nucleotides.

170. The kit of claim 166, wherein the expression level of GNAI2 is detected using a nucleic acid probe comprising nucleic acid sequence of SEQ ID NO: 25, complements thereof, or fragments thereof having at least 15 nucleotides.

171. The kit of claim 166, wherein the expression level of ZER1 is detected using a nucleic acid probe comprising nucleic acid sequence of SEQ ID NO: 67, complements thereof, or fragments thereof having at least 15 nucleotides.

172. A kit comprising a probe for detecting the expression level of ZER1 for determining whether a subject is at risk of lung cancer.

173. The kit of claim 172, wherein the probe is a nucleic acid probe detecting the nucleic acid sequence of SEQ ID NO: 68.

174. The kit of claim 172, wherein the probe is a nucleic acid probe comprising nucleic acid sequence of SEQ ID NO: 67, complements thereof, or fragments thereof having at least 15 nucleotides.

175. The kit of claim 172, wherein the probe is an antibody, or a fragment thereof, that binds to a protein having an amino acid sequence of SEQ ID NO: 69.

176. The kit of claim 172, further comprising one or more probes for detecting the expression level of one or more biomarkers selected from the group consisting of ABCC13, ADCK3, GALNT14, GNAI2, and PPM1M.

177. The kit of claim 176, wherein the expression level of ABCC13 is detected using a nucleic acid probe comprising nucleic acid sequence of SEQ ID NO: 1, complements thereof, or fragments thereof having at least 15 nucleotides.

178. The kit of claim 176, wherein the expression level of ADCK3 is detected using a nucleic acid probe comprising nucleic acid sequence of SEQ ID NO: 4, complements thereof, or fragments thereof having at least 15 nucleotides.

179. The kit of claim 176, wherein the expression level of GALNT14 is detected using a nucleic acid probe comprising nucleic acid sequence of SEQ ID NO: 22, complements thereof, or fragments thereof having at least 15 nucleotides.

180. The kit of claim 176, wherein the expression level of GNAI2 is detected using a nucleic acid probe comprising nucleic acid sequence of SEQ ID NO: 25, complements thereof, or fragments thereof having at least 15 nucleotides.

181. The kit of claim 176, wherein the expression level of PPM1M is detected using a nucleic acid probe comprising nucleic acid sequence of SEQ ID NO: 91, complements thereof, or fragments thereof having at least 15 nucleotides.

182. The kit of any one of claims 122 to 181, further comprising one or more probes for detecting the expression level of one or more biomarkers selected from the group consisting of AMD1, CLCN4, PDCD6IP, PUM1, RBPMS2, and UBAP2.

183. The kit of claim 182, wherein the expression level of AMD1 is detected using a nucleic acid probe comprising nucleic acid sequence of SEQ ID NO: 7, complements thereof, or fragments thereof having at least 15 nucleotides.

184. The kit of claim 182, wherein the expression level of CLCN4 is detected using a nucleic acid probe comprising nucleic acid sequence of SEQ ID NO: 73, complements thereof, or fragments thereof having at least 15 nucleotides.

185. The kit of claim 182, wherein the expression level of PDCD6IP is detected using a nucleic acid probe comprising nucleic acid sequence of SEQ ID NO: 40, complements thereof, or fragments thereof having at least 15 nucleotides.

186. The kit of claim 182, wherein the expression level of PUM1 is detected using a nucleic acid probe comprising nucleic acid sequence of SEQ ID NO: 94, complements thereof, or fragments thereof having at least 15 nucleotides.

187. The kit of claim 182, wherein the expression level of RBPMS2 is detected using a nucleic acid probe comprising nucleic acid sequence of SEQ ID NO: 97, complements thereof, or fragments thereof having at least 15 nucleotides.

188. The kit of claim 182, wherein the expression level of UBAP2 is detected using a nucleic acid probe comprising nucleic acid sequence of SEQ ID NO: 58, complements thereof, or fragments thereof having at least 15 nucleotides.

189. The kit of any one of claims 122 to 188, further comprising one or more probes for a set of biomarkers comprising one or more biomarkers selected from the group consisting of ANKHD1, CIR1, CLK3, CTSH, DNAJB1, EPHX2, GSR, HDAC3, IFI27, INO80C, ITPR1, LGR6, LILRA5, PNPLA6, PSMB4, SCAF4, SLC25A20, SNRPD3, STAMBP, TMEM8A, TPR, VNN1, VPS29, and WDFY3 to establish a biomarker expression profile for the subject.

190. The kit of claim 189, wherein the probe for ANKHD1 is a nucleic acid probe comprising nucleic acid sequence of SEQ ID NO: 70, complements thereof, or fragments thereof having at least 15 nucleotides.

191. The kit of claim 189, wherein the probe for CIR1 is a nucleic acid probe comprising nucleic acid sequence of SEQ ID NO: 10, complements thereof, or fragments thereof having at least 15 nucleotides.

192. The kit of claim 189, wherein the probe for CLK3 is a nucleic acid probe comprising nucleic acid sequence of SEQ ID NO: 13, complements thereof, or fragments thereof having at least 15 nucleotides.

193. The kit of claim 189, wherein the probe for CTSH is a nucleic acid probe comprising nucleic acid sequence of SEQ ID NO: 76, complements thereof, or fragments thereof having at least 15 nucleotides.

194. The kit of claim 189, wherein the probe for DNAJB1 is a nucleic acid probe comprising nucleic acid sequence of SEQ ID NO: 16, complements thereof, or fragments thereof having at least 15 nucleotides.

195. The kit of claim 189, wherein the probe for EPHX2 is a nucleic acid probe comprising nucleic acid sequence of SEQ ID NO: 19, complements thereof, or fragments thereof having at least 15 nucleotides.

196. The kit of claim 189, wherein the probe for GSR is a nucleic acid probe comprising nucleic acid sequence of SEQ ID NO: 28, complements thereof, or fragments thereof having at least 15 nucleotides.

197. The kit of claim 189, wherein the probe for HDAC3 is a nucleic acid probe comprising nucleic acid sequence of SEQ ID NO: 79, complements thereof, or fragments thereof having at least 15 nucleotides.

198. The kit of claim 189, wherein the probe for IFI27 is a nucleic acid probe comprising nucleic acid sequence of SEQ ID NO: 31, complements thereof, or fragments thereof having at least 15 nucleotides.

199. The kit of claim 189, wherein the probe for INO80C is a nucleic acid probe comprising nucleic acid sequence of SEQ ID NO: 34, complements thereof, or fragments thereof having at least 15 nucleotides.

200. The kit of claim 189, wherein the probe for ITPR1 is a nucleic acid probe comprising nucleic acid sequence of SEQ ID NO: 82, complements thereof, or fragments thereof having at least 15 nucleotides.

201. The kit of claim 189, wherein the probe for LGR6 is a nucleic acid probe comprising nucleic acid sequence of SEQ ID NO: 37, complements thereof, or fragments thereof having at least 15 nucleotides.

202. The kit of claim 189, wherein the probe for LILRA5 is a nucleic acid probe comprising nucleic acid sequence of SEQ ID NO: 85, complements thereof, or fragments thereof having at least 15 nucleotides.

203. The kit of claim 189, wherein the probe for PNPLA6 is a nucleic acid probe comprising nucleic acid sequence of SEQ ID NO: 88, complements thereof, or fragments thereof having at least 15 nucleotides.

204. The kit of claim 189, wherein the probe for PSMB4 is a nucleic acid probe comprising nucleic acid sequence of SEQ ID NO: 43, complements thereof, or fragments thereof having at least 15 nucleotides.

205. The kit of claim 189, wherein the probe for SCAF4 is a nucleic acid probe comprising nucleic acid sequence of SEQ ID NO: 46, complements thereof, or fragments thereof having at least 15 nucleotides.

206. The kit of claim 189, wherein the probe for SLC25A20 is a nucleic acid probe comprising nucleic acid sequence of SEQ ID NO: 100, complements thereof, or fragments thereof having at least 15 nucleotides.

207. The kit of claim 189, wherein the probe for SNRPD3 is a nucleic acid probe comprising nucleic acid sequence of SEQ ID NO: 49, complements thereof, or fragments thereof having at least 15 nucleotides.

208. The kit of claim 189, wherein the probe for STAMBP is a nucleic acid probe comprising nucleic acid sequence of SEQ ID NO: 52, complements thereof, or fragments thereof having at least 15 nucleotides.

209. The kit of claim 189, wherein the probe for TMEM8A is a nucleic acid probe comprising nucleic acid sequence of SEQ ID NO: 55, complements thereof, or fragments thereof having at least 15 nucleotides.

210. The kit of claim 189, wherein the probe for TPR is a nucleic acid probe comprising nucleic acid sequence of SEQ ID NO: 103, complements thereof, or fragments thereof having at least 15 nucleotides.

211. The kit of claim 189, wherein the probe for VNN1 is a nucleic acid probe comprising nucleic acid sequence of SEQ ID NO: 61, complements thereof, or fragments thereof having at least 15 nucleotides.

212. The kit of claim 189, wherein the probe for VPS29 is a nucleic acid probe comprising nucleic acid sequence of SEQ ID NO: 64, complements thereof, or fragments thereof having at least 15 nucleotides.

213. The kit of claim 189, wherein the probe for WDFY3 is a nucleic acid probe comprising nucleic acid sequence of SEQ ID NO: 106, complements thereof, or fragments thereof having at least 15 nucleotides.

214. The kit of claim 189, wherein the set of biomarkers comprises five or more biomarkers.

215. The kit of claim 189, wherein the set of biomarkers comprises ten or more biomarkers.

216. The kit of claim 189, wherein the set of biomarkers comprises fifteen or more biomarkers.

217. The kit of claim 189, wherein the set of biomarkers comprises twenty or more biomarkers.

218. The kit of any one of claims 122 to 217, wherein the lung cancer is non-small cell lung cancer (NSCLC).

219. The kit of claim 218, wherein the NSCLC is a stage I NSCLC.

220. The kit of claim 218, wherein the NSCLC is a stage II NSCLC.

221. The kit of claim 218, wherein the NSCLC is a mixture of early and late stages and types of NSCLC.

222. The kit of any one of claims 122 to 217, wherein the lung cancer is lung adenocarcinoma.

223. The kit of any one of claims 122 to 217, wherein the lung cancer is lung squamous cell carcinoma.

224. The kit of any one of claims 122 to 217, wherein the lung cancer is a lung carcinoid tumor.

225. The kit of claim 224, wherein the lung carcinoid tumor is a typical carcinoid tumor of the lung.

226. The kit of claim 224, wherein the lung carcinoid tumor is an atypical carcinoid tumor of the lung.

227. The kit of any one of claims 122 to 217, wherein the lung cancer is adenosquamous carcinoma of the lung.

The application's sequence listing, which the Patent Office published only in electronic form, follows.

SEQUENCE LISTING (537 sequences)

SEQ ID NO: 1 - DNA, 100 bp, Homo sapiens
agttgccttattcaaagtgtttgctgatattttgtccttcactagcccactcataatgaagcaaattatcattttctgtgaacacagctcagattttggc

SEQ ID NO: 2 - DNA, 4166 bp, Homo sapiens
ttcccgtctccctccacaccttgcctcctccaggcccaaccccattccaccagcaccccgccccaggcgcactggctaggactggaaggcaaggactaaggtgaaagctgactgcccgcaccgccccaggcgcactgggtaggactgaaaggcagggactaaggtgacagctgactctgccggggcggagtgcgtgtcctcccaccgtgctggcgctgaactgactgtccgctgccaagggaagtgacagccgcagccgggctctcagccagcggccaggcgccccgcggaccatgctctccagtacgcagaacgcgggcggctcctatcagcgggtccgcggggcgcttgatacacagaaatgcagtccagagaaaagtgcctcatttttcagtaaagtgacatattcctggtttagcagagtaattactttaggctataagagacctttggaaagagaggatctttttgaactaaaggaaagtgattccttctgcactgcgtgtcccatctttgaaaaacaatggagaaaggaagttttaaggaatcaagagaggcaaaaagtaaaggtatcttgttataaagaggcacatatcaagaaaccatctctactctatgcattgtggaacacctttaaatccatcctgattcaagttgccttattcaaagtgtttgctgatattttgtccttcactagcccactcataatgaagtaagttaaagtctggtgggttttttttccctcctcacagataaatgaaaagtaagtattctaatataaaagttctaatacaaaagagtagagaaggttcttattgcaaatattattaggatgtggacatgctattagggttatctacaatataaatgggaattaggataatatagtcaatatctaataaagtcaaccctgtactaagcactgctctaaaatcttatattaattttattaagcaagggttcgccagagaaacagaaccaataggatatataagcccaaataagaggggatttattatgggaattggctctcgcaattatggaggccaagaagtcccacagtcttgcatttgcaagctagagactcaggaaagacagtggcataatgcagtctgagtccaaaggccaggtaaccttgagttctgacgtccacgggcaggagaaggtggatatttcagctccaggaaagagagctaattcactctctctttaccttcttgttctatccaggccctcaacaaattggatgaggcactatgccctgggatcatccttactcagtctactgattcaaatgctaatctcttccagaaacagcctcacagacacacccagacatctggtagatggtaaaacattatttaaatgttattaaacagaaataatgttttaccatctcttcaccagtcaagttgacacgtaaaattaaccatcacattggtaatctcatttaatctttactacactcctgcaacatagacagtattattacattcagtattacaatggcagaaacagacagaaagggtggagtaatttgtccaagtccccacagctagaaagtgccagagtcgtaattgaaatctaggaagtctcgcttgaatgtatgcgatacatattttcactacgatacttagttgtggccttttgagagttgagctttaacagccatggcaattacacacacacacaaacatacactcacacacacaattactatgtataacatatatgaacatatattattattacctaatatatgtatatttctgtgcatctctatatctagatatggacatagtaaaatgacttgaaacatttctataatatctacctgcaatggtttacaggcagacaatgaaattgatcttttgactgtgccacctttttcaaggaaaccttgacttatacctagctgtcatatgaaggaaatgcaaagaaacatatattttattaactggtgattatatttttactattgaaaaatttccaagttgttagagtttttaataaccatttaattcatgaaaatatcattaatcctgcattacttagatcccatatgatattcaggaatatattcattcaatatttattgagcacctatgcatgccaaaactgttctaggtcgactgcggggacagaacaaaaatcaaaacaaagaacctgctctgatgacacttagaggggagagatgaaagccaaacaaatgaataaacataaatgataccatcagtgcttaggaacaaagtaaagtagggtaagggaatgccagtctgaggagttagaagttaccgttttatgtaaggtaattatgaaagacattggtgataaggtgacatttggtcacagttctgaaggaagttagggaggaagccaagaaaatatctattgtgattaaaggtagcaggaagggcaaaagtcatgaagaagctcatgcttgatatctctgagggcctgcaaggaggcaaagtgaggttggagcagagagctggaaaggtaagactgaggtcagaaaggtgcagagatgaaaagattttgaaggaccttatgaaatatgatgggaatattggcttttagtccacattagcagggaagaatttggaagattttgagcaaaaaaacaatgatctgcttagacttaagtcttataggaatgactctggctgctatgtggggaataaaatcaagacgtgcaagagtggaagaagaaacaccagttagaagtttgtttgcgataatccaagcaaaagttaatggtggcttcaactaggtagtagcaataagggtgataagaagtggtcagactctggttgtgttttaaaggtagagttaacagaatatactggtggactgaatgtaggttgagagaggaagcgagaagttaaggatgccttcaaaatttttgtttagatcatcaggtaaatgagtcagcatatccttgtagtatgtcacagtatacgcccaaattgttttcaccatattgcatgtgctatatagccttttaaatttaacactattttcagtcgcattgatgcagttttaaaaaggtgaaatcatgcttaaaatattattaccagtgaacatcaggcactctgagttttagacaatgtttatagttgagggactatcagccgagatacttgtaattagaaccatccccactgtttttctgctccccagcattggccctaatcatcctgatcatgctgtcacaaacttaagaggaaataaggaaaaggagagaaaaaagaaattggttatgaataaaagtgacaataaaacatgagatataaatcaagcttaaaaaaaaaaagcagcacctgtgggccatactaaaagatcccctacttacgttctggttgtcatgtttccctgtatttgataaaacacataattttgagaaaaataaagttttaaatgtatctatgtctcgacttttctgatgaagttataccagaaaagttaattatttgatgggcctgccatgtgaaaaccagaaaataacctcgtactcacaagccagtggaagggattcctgattttactaaaaaaaaaaaaaaaaaagagagggcggggacaaatatcaaattaagcaagtaaagaaaaagaacaggtaagagtgtgtgtgtgtgtgtgtgtgtgtaacactttgacaatactaaactctcataagcatttaacacttcagatgtttaacatttctgcccctttctcaatttttatgacgtgcaggcaaattatcattttctgtgaacacagctcagattttggctggaatggctatggctatgcagtggcacttcttgttgtagtctttttgcaaactctgattcttcagcaatatcaacgttttaacatgctcacctcagcaaaagttaagacagctgtaaatggactgatctacaaaaaggccttacttttatcaaatgtttctcgacaaaagttttccactggggaaattattaacttgatgtcagcaactcatggacttgacagcaaacctcaatctcctctggtctgccccttttcaaatcctaatggccgtatatctcctttggcaagagctgggtccagcagtgttagcaggggtggcagtccttgtgtttgttataccaataaatgctttagctgcaactaaaataaaaaagttaaaggtaagaaaa

SEQ ID NO: 3 - protein, 140 aa, Homo sapiens
MLSSTQNAGGSYQRVRGALDTQKCSPEKSASFFSKVTYSWFSRVITLGYKRPLEREDLFELKESDSFCTACPIFEKQWRKEVLRNQERQKVKVSCYKEAHIKKPSLLYALWNTFKSILIQVALFKVFADILSFTSPLIMK

SEQ ID NO: 4 - DNA, 104 bp, Homo sapiens
ggatgagctctgcagcccacatgtgctgaccacagagctggtgtctggcttccccctggaccaggccgaagggctcagccaggagattcggaacgagatctgct

SEQ ID NO: 5 - DNA, 2866 bp, Homo sapiens
aaacagatccggagcgcgtggcgggcgtcagcgcggtggccagcgcgcagaggcgggcgcggaggcggctagaaggtgaccgcggatcccagcttcctgcagccagccctgaaggatggctgccatattgggagacaccatcatggtggctaaaggccttgtcaagctgacccaggcggccgtggaaacccacctgcagcacttgggcatcggaggggagctgatcatggcggccagggccctgcagtccacggctgtggagcagattggcatgttcttggggaaggtgcagggtcaggataaacatgaagaatattttgctgagaacttcggcggcccagaaggggagttccacttctcagtcccgcatgcagccggagcctccacagacttctcttcagcctccgctcccgaccagtcagcgcccccatccctgggtcatgcccacagcgagggcccagctcctgcctacgtggccagtggaccctttagagaagccgggttccccggccaggcctcctcccctctgggcagggccaacgggaggctctttgcaaaccccagagactcattctctgccatgggctttcagcgaaggttcttccaccaggaccaatcccctgttgggggcctcacagccgaggacattgagaaggcccggcaggctaaggctcgccccgagaacaagcagcacaaacagacgctcagcgagcatgcccgggagcggaaggtgcctgtgacgaggattggccggctggccaacttcggaggtctggccgtgggcctgggcttcggggcactggcagaggtcgccaagaagagcctgcgctccgaggacccctcagggaagaaggccgtgctgggttccagtcctttcctgtccgaggccaatgcagagcggatcgtgcgcacgctctgcaaggtgcgtggtgcggcactcaagctgggccagatgctgagcatccaggatgatgcctttatcaacccccacctggctaagatcttcgagcgggtgcggcagagcgcggacttcatgccactgaagcagatgatgaaaactctcaacaacgacctgggccccaactggcgggacaagttggaatacttcgaggagcggcccttcgccgccgcatccattgggcaggtgcacttggcccgaatgaagggcggccgcgaggtggccatgaagatccagtaccctggcgtggcccagagcatcaacagtgatgtcaacaacctcatggccgtgttgaacatgagcaacatgcttccagaaggcctgttccccgagcacctgatcgacgtgctgaggcgggagctggccctggagtgtgactaccagcgagaggccgcctgtgcccgcaagttcagggacctgctgaagggccaccccttcttctatgtgcctgagattgtggatgagctctgcagcccacatgtgctgaccacagagctggtgtctggcttccccctggaccaggccgaagggctcagccaggagattcggaacgagatctgctacaacatcctggttctgtgcctgagggagctgttcgagttccacttcatgcaaacagaccccaactggtccaacttcttctatgacccccagcagcacaaggtggctcttttggattttggggcaacgcgggaatatgacagatccttcaccgacctctacattcagatcatcagggctgctgccgacagggacagggagactgtgcgggcgaaatccatagagatgaagttcctcaccggctacgaggtcaaggtcatggaagacgcccacttggatgccatcctcatcctgggggaggccttcgcctctgatgagccttttgattttggcactcagagcaccaccgagaagatccacaacctgattcccgtcatgctgaggcaccgtctcgtccccccacccgaggaaacctactccctgcacaggaagatggggggctccttcctcatctgctccaagctgaaggcccgcttcccctgcaaggccatgttcgaggaggcctacagcaactactgcaagaggcaggcccagcagtagggctgcgggccacgcccaggccggctccgcgggaactctctccctcagacaggccaaaaaccagtagcgaggtcgtggtgatgctctttttaactcctttgcccaataaggggggtggctgcctggagccccgtagccagcgctttccacggtttctgttgctaaatggttgtagggtgagaagtgcaagaatgaagatgaagccccactgctcggtcagtctgcctccgtgtgtcctctgaaataagcagatgaagatgaaagggcaactttgttttcttctttttcctgatgtgaatgttaagcagaagggagagagtccttactcccttccaatctctgttcagtgcaaaacccagaaacatgaacagatacgattgtgggattttatcatctgtgtagtaggtgtgtgtatgtgtttctagagtgagatttgtgttttctgcccttttcctctccagccgatgggctggagctgggagaggtgctgagctaacagtgccaacaagtgctccttaagcctgcgaggcccaggcctgtggggctggttctcacctttgacagctgaatgttcctaaagaactgctgccccacagtgagggtgggagcagcggaacagggaatgccagacacaggctcgctgctgctggaaggcggggtgggacttccttcctctgtccggagaggcacaggtgtcaccagttccagccaaaggctcctcacaggcgctgtgaatttttgtacaagtcttgtaattatcgaatcaacaacttgtttcaatttaataaaaatgctcatgggaagtgc

SEQ ID NO: 6 - protein, 647 aa, Homo sapiens
MAAILGDTIMVAKGLVKLTQAAVETHLQHLGIGGELIMAARALQSTAVEQIGMFLGKVQGQDKHEEYFAENFGGPEGEFHFSVPHAAGASTDFSSASAPDQSAPPSLGHAHSEGPAPAYVASGPFREAGFPGQASSPLGRANGRLFANPRDSFSAMGFQRRFFHQDQSPVGGLTAEDIEKARQAKARPENKQHKQTLSEHARERKVPVTRIGRLANFGGLAVGLGFGALAEVAKKSLRSEDPSGKKAVLGSSPFLSEANAERIVRTLCKVRGAALKLGQMLSIQDDAFINPHLAKIFERVRQSADFMPLKQMMKTLNNDLGPNWRDKLEYFEERPFAAASIGQVHLARMKGGREVAMKIQYPGVAQSINSDVNNLMAVLNMSNMLPEGLFPEHLIDVLRRELALECDYQREAACARKFRDLLKGHPFFYVPEIVDELCSPHVLTTELVSGFPLDQAEGLSQEIRNEICYNILVLCLRELFEFHFMQTDPNWSNFFYDPQQHKVALLDFGATREYDRSFTDLYIQIIRAAADRDRETVRAKSIEMKFLTGYEVKVMEDAHLDAILILGEAFASDEPFDFGTQSTTEKIHNLIPVMLRHRLVPPPEETYSLHRKMGGSFLICSKLKARFPCKAMFEEAYSNYCKRQAQQ

SEQ ID NO: 7 - DNA, 105 bp, Homo sapiens
ctcccggcagcagcccgacgcaaaccaaggatctggggatcttcgcactatcccaagatctgagtgggacatacttttgaaggatgtgcaatgttcaatcataag

SEQ ID NO: 8 - DNA, 3437 bp, Homo sapiens
cgcttacacagtatggccggcgacattagctagcgctcgctctactctctctaacgggaaagcagcggaatacaagagactgaactgtatctgcctctatttccaaaagactcacgttcaactttcgctcacacaaagccgggaaaattttattagtcctttttttaaaaaaagttaatataaaattatagcaaaaaaaaaaaggaacctgaactttagtaacacagctggaacaatccgcagcggcggcggcagcggcgggagaagaggtttaatttagttgattttctgtggttgttggttgttcgctagtctcacggtgatggaagctgcacattttttcgaagggaccgagaagctgctggaggtttggttctcccggcagcagcccgacgcaaaccaaggatctggggatcttcgcactatcccaagatctgagtgggacatacttttgaaggatgtgcaatgttcaatcataagtgtgacaaaaactgacaagcaggaagcttatgtactcagtgagagtagcatgtttgtctccaagagacgtttcattttgaagacatgtggtaccaccctcttgctgaaagcactggttcccctgttgaagcttgctagggattacagtgggtttgactcaattcaaagcttcttttattctcgtaagaatttcatgaagccttctcaccaagggtacccacaccggaatttccaggaagaaatagagtttcttaatgcaattttcccaaatggagcagcatattgtatgggacgtatgaattctgactgttggtacttatatactctggatttcccagagagtcgggtaatcagtcagccagatcaaaccttggaaattctgatgagtgagcttgacccagcagttatggaccagttctacatgaaagatggtgttactgcaaaggatgtcactcgtgagagtggaattcgtgacctgataccaggttctgtcattgatgccacaatgttcaatccttgtgggtattcgatgaatggaatgaaatcggatggaacttattggactattcacatcactccagaaccagaattttcttatgttagctttgaaacaaacttaagtcagacctcctatgatgacctgatcaggaaagttgtagaagtcttcaagccaggaaaatttgtgaccaccttgtttgttaatcagagttctaaatgtcgcacagtgcttgcttcgccccagaagattgaaggttttaagcgtcttgattgccagagtgctatgttcaatgattacaattttgtttttaccagttttgctaagaagcagcaacaacagcagagttgattaagaaaaatgaagaaaaaacgcaaaaagagaacacatgtagaaggtggtggatgctttctagatgtcgatgctgggggcagtgctttccataaccaccactgtgtagttgcagaaagccctagatgtaatgatagtgtaatcattttgaattgtatgcattattatatcaaggagttagatatcttgcatgaatgctctcttctgtgtttaggtattctctgccactcttgctgtgaaattgaagtgcatgtagaaaaaaccttttactatatgaaactttacaacacttgtgaaagcaactcaatttggtttatgcacagtgtaatatttctccaagtatcatccaaaattccccacagacaaggctttcgtcctcattaggtgttggcctcagcctaaccctctaggactgttctattaaattgctgccagaattttacatccagttacctccactttctagaacatattctttactaatgttattgaaaccaatttctacttcatactgatgtttttggaaacagcaattaaagtttttcttccatgagttgagtccttaagaaaatgattccagttactcattttgcatatttgctattttaacattattggaccctgcatttatagtcctttgatttcttccctctccctggtgtctcccccaagaccccaaataaagcaatacactgttaacactgtgggtttatatactaattctataccccagatggggaatgggggagatggtccctgggcttaatattctttaaagggcatgggaatttagcctctcttttattgtaatgtgctcttttggaaaatagttggttagcagggaagacccagagttgtagattgagattagggtgtactggctgaactgtggaaaacatacaattctgtgttcctcagtaaatgagattagcgtctaatgagtagcacccctttactaacttagtagtagtataaaatcatttttatttagttaattaccagagagatttagcataattttgttctggattcagtaaatcaagtcagcttggatcattcaccttaacttttcctttagcagccatttccactagtttccattaagtagtgttctataaactttgatccaaagcagaatcaatgtcttttccatctcgtgacttaaagttctgtgactgtgatgcatgtgagtgttccgacttcatctgttcctcttaactacggtgtttcccttaccatggcattcataggatgaaatgaatgactgcccagaatgagaatttgtccagattattcagataaacatcataaagcagaatacattataaataagtagaatatgaataaatagaataataaaattccaaaatactcaatgggaaatgactagtaatataggctttcaagagttggtaccttttagctatatttgcagattctctgggattttaaggaactgagaaaacagcaaagttgactaaattttatatttcttgtcctctaaatattttgataatttctggattgatgcagtgatgtttttgttccttccgtatttataaatgaaacacctttttttagtgtttctaaacctaaaatctacttggtttgaaatcaagtggttggaacactgtttgacttttatttgaagcatgttgttgattgaaaatttcattgaggaagttttcaatcagtgtgatcagtttgattctgtaatgagcacagcacctaatattttgaggagctctgttttgaggaccaatgcttaaggtggactttgttcgtaaacaatatcccaatagatttgttgacttgaggtctggtttggttttgtttttgttttgttttgttttgttttgtttccaatagaattaagaattctaatgttgaaaaactgcacaaatttttatgggacaaagcctagaaaagagaaatgtagtttgaatcataatctaaatcatcgtatgatagaagagggaaagttttggtgccataatttctcctttcactggtgttggacttaaatcagttgaaatgtatttctgtaccacaatttacgcttcaataaaagtttaattgtctagtgacattcagaaaaaaaaaaaaaaaa

SEQ ID NO: 9 - protein, 334 aa, Homo sapiens
MEAAHFFEGTEKLLEVWFSRQQPDANQGSGDLRTIPRSEWDILLKDVQCSIISVTKTDKQEAYVLSESSMFVSKRRFILKTCGTTLLLKALVPLLKLARDYSGFDSIQSFFYSRKNFMKPSHQGYPHRNFQEEIEFLNAIFPNGAAYCMGRMNSDCWYLYTLDFPESRVISQPDQTLEILMSELDPAVMDQFYMKDGVTAKDVTRESGIRDLIPGSVIDATMFNPCGYSMNGMKSDGTYWTIHITPEPEFSYVSFETNLSQTSYDDLIRKVVEVFKPGKFVTTLFVNQSSKCRTVLASPQKIEGFKRLDCQSAMFNDYNFVFTSFAKKQQQQQS

SEQ ID NO: 10 - DNA, 99 bp, Homo sapiens
tcggttcccactgatggctcagggccatcgatgcacccctcggagctaatagcggagatgagaaacagtgggtttgcactgaaacgaaatgtactgggg

SEQ ID NO: 11 - DNA, 1918 bp, Homo sapiens
gctgctggaaacgcagttccggttaggcggctgagtttgtttacgttgctaacagatctagcccctgctttccctagttccagttccaagatggggaaatccttcgccaacttcatgtgcaagaaagactttcatcctgcctccaaatccaatatcaaaaaagtatggatggcagaacagaaaatatcatatgataagaagaaacaagaagaattgatgcagcaatatcttaaagaacaagaatcatatgataatagattgcttatgggagatgaacgtgtaaagaatggccttaatttcatgtatgaagccccaccaggagctaaaaaagaaaacaaagagaaagaagaaacagaaggagagaccgaatacaaatttgaatggcagaaaggagccccacgagaaaaatatgccaaagatgacatgaacatcagagatcagccctttggtattcaggttcgaaatgtgaggtgcattaaatgtcacaaatggggtcatgtcaacacagatcgagaatgtcctttgtttggtctttctggaatcaatgcaagttcggttcccactgatggctcagggccatcgatgcacccctcggagctaatagcggagatgagaaacagtgggtttgcactgaaacgaaatgtactggggagaaacttgaccgcaaatgatccatcacaggagtatgttgcaagtgagggtgaagaagatccagaagttgaatttttaaagtcactaacaaccaaacaaaaacagaaacttctcaggaaattagatcgactggagaagaaaaaaaagaaaaaagatagaaaaaagaaaaagtttcagaagagcagaagtaaacacaaaaaacataagtcctcttcttcctcatcttcctcctcctcctcctcttcctctactgagacttcagaaagcagtagtgagagtgagagtaacaataaagaaaaaaaaatacaaaggaagaaaagaaagaaaaacaagtgttcagggcataacaacagtgattctgaagagaaggacaagtctaagaagagaaagcttcatgaagaactttctagcagtcaccataaccgggaaaaagccaaggaaaagcccaggttcttaaaacacgagagttctagggaggacagcaaatggagccattctgattctgacaaaaagtccagaacccataaacatagcccagagaagagaggctctgaaagaaaggaggggagcagcagaagccacggcagggaggaaaggagccggagaagccggagcagaagtcctggtagttacaagcaaagggagacaaggaaacgggcacagcgaaatcctggtgaagagcaaagcagaagaaatgacagcagaagccatggcacagacttgtatagaggagaaaaaatgtacagagagcacccaggaggtacacatactaaagtgacacaaagagaatgaagcagaagtagagaagaaagactgtatgtgacaattacctgggaataaaaatatctccacttttttattgaatacctttagcaaggggtaaattatgtactgttgtctttctaataaaaaagctcaattttaatttttcatctctagactgtcaattcaagtacaaaactacatgagtactataagaatgaattttgcaaatatttgtaagtaagctattttggggctgtggaaatattttctgttggtaactgtttcttgttccccataccagataaaaaccgcatataactctgtgacattttctttgttctgaaacatcattaaaagaatgacagtacattgaatgggtataatttacttttttcaattcaaatttgttattctaggatttgaatttgcttgaagtgaattgtaataattattcaaattcattagtataaattaaggattaataaatctttaagacttttaa

SEQ ID NO: 12 - protein, 450 aa, Homo sapiens
MGKSFANFMCKKDFHPASKSNIKKVWMAEQKISYDKKKQEELMQQYLKEQESYDNRLLMGDERVKNGLNFMYEAPPGAKKENKEKEETEGETEYKFEWQKGAPREKYAKDDMNIRDQPFGIQVRNVRCIKCHKWGHVNTDRECPLFGLSGINASSVPTDGSGPSMHPSELIAEMRNSGFALKRNVLGRNLTANDPSQEYVASEGEEDPEVEFLKSLTTKQKQKLLRKLDRLEKKKKKKDRKKKKFQKSRSKHKKHKSSSSSSSSSSSSSSTETSESSSESESNNKEKKIQRKKRKKNKCSGHNNSDSEEKDKSKKRKLHEELSSSHHNREKAKEKPRFLKHESSREDSKWSHSDSDKKSRTHKHSPEKRGSERKEGSSRSHGREERSRRSRSRSPGSYKQRETRKRAQRNPGEEQSRRNDSRSHGTDLYRGEKMYREHPGGTHTKVTQRE

SEQ ID NO: 13 - DNA, 107 bp, Homo sapiens
agctctgacggccggtatgtgaaggagaactgcaaacctctgaagagttacatgctccaagactccctggagcacgtgcagctgtttgacctgatgaggaggatgtt

SEQ ID NO: 14 - DNA, 2713 bp, Homo sapiens
agttttctcatctggaaagtggggcctcgtaatcctgtccgacccggcgcgggacagtaggtgtcagggattttggtgaccccacgctcgaggcctctgcaaaagggggctgtccagtggcccagagacgcagccggcggggcttttgtctagcgggggagtcttaactgagaggccacgcaggccggcaggaagccgctccacaggagggggctcaaggagaggggatctcctccctccagactccggccccgccagagtagctctagggtatcttcccagaaactgccccgcacgcactggcgagctgggagcgccaccacggctttcaaaaaacccgcacacaccaagataataatgtgtcgttcgctcgtttcgcgcaagcggagtcgcgtccgccttcccgagctccggcacacagacctcaggccgctctcgcgctctccggggccccgagaacaatgcccgtcctctccgcgcgcaggagggagttggcggaccacgcggggtcggggcgacggagcgggcccagccccacggccaggtcggggccccacctctcggctctgagagcccagccggcccgggccgcgcacctgtcaggtcgggggacctacgtgcgccgcgacacggcgggaggcgggccgggccaggctcgtcccctcggccctcccggaactagtctcctaggccgcggcgcccgccggagcggagagggctggtgccccggagccttcgagtcgggggctagagcggccaggcctccgagccgggtcgagccgaggctggcgacggctgcgtcacgcgagggggcggggctgccacgggcggaggtcgcagccggaagcggaagaggcgctcggagcggggagtggggcctagctgcagccggagcctgggagacgatgcatcactgtaagcgataccgctcccctgaaccagacccgtacctgagctaccgatggaagaggaggaggtcctacagtcgggaacatgaagggagactgcgatacccgtcccgaagggagcctcccccacgaagatctcggtccagaagccatgaccgcctgccctaccagaggaggtaccgggagcgccgtgacagcgatacataccggtgtgaagagcggagcccatcctttggagaggactactatggaccttcacgttctcgtcatcgtcggcgatcgcgggagagggggccataccggacccgcaagcatgcccaccactgccacaaacgccgcaccaggtcttgtagcagcgcctcctcgagaagccaacagagcagtaagcgcagcagccggagtgtggaagatgacaaggagggtcacctggtgtgccggatcggcgattggctccaagagcgatatgagattgtggggaacctgggtgaaggcacctttggcaaggtggtggagtgcttggaccatgccagagggaagtctcaggttgccctgaagatcatccgcaacgtgggcaagtaccgggaggctgcccggctagaaatcaacgtgctcaaaaaaatcaaggagaaggacaaagaaaacaagttcctgtgtgtcttgatgtctgactggttcaacttccacggtcacatgtgcatcgcctttgagctcctgggcaagaacacctttgagttcctgaaggagaataacttccagccttaccccctaccacatgtccggcacatggcctaccagctctgccacgcccttagatttctgcatgagaatcagctgacccatacagacttgaaaccagagaacatcctgtttgtgaattctgagtttgaaaccctctacaatgagcacaagagctgtgaggagaagtcagtgaagaacaccagcatccgagtggctgactttggcagtgccacatttgaccatgagcaccacaccaccattgtggccacccgtcactatcgcccgcctgaggtgatccttgagctgggctgggcacagccctgtgacgtctggagcattggctgcattctctttgagtactaccggggcttcacactcttccagacccacgaaaaccgagagcacctggtgatgatggagaagatcctagggcccatcccatcacacatgatccaccgtaccaggaagcagaaatatttctacaaagggggcctagtttgggatgagaacagctctgacggccggtatgtgaaggagaactgcaaacctctgaagagttacatgctccaagactccctggagcacgtgcagctgtttgacctgatgaggaggatgttagaatttgaccctgcccagcgcatcacactggccgaggccctgctgcaccccttctttgctggcctgacccctgaggagcggtccttccacaccagccgcaacccaagcagatgacaggcacaggccaccgcatgaggagatggagggcgggactgggccgcccagccccttgactccagcctcgaccgccaggccccaggccagagccacccaatgaacagtgcaatgtgaaggaaggcaggagcctgcaggggagcagacttggtgcccagctgccagaaagcacagatttgacccaagctatttatatgttataaagttataataaagtgtttcttactgtttgtaacccctggtaccagtgtgtccatctccaggctccttgccttccccttacctgaccttattaataaagtctttcttagcagttcaaaaaaaaaaaaaaaaaa

SEQ ID NO: 15 - protein, 638 aa, Homo sapiens
MPVLSARRRELADHAGSGRRSGPSPTARSGPHLSALRAQPARAAHLSGRGTYVRRDTAGGGPGQARPLGPPGTSLLGRGARRSGEGWCPGAFESGARAARPPSRVEPRLATAASREGAGLPRAEVAAGSGRGARSGEWGLAAAGAWETMHHCKRYRSPEPDPYLSYRWKRRRSYSREHEGRLRYPSRREPPPRRSRSRSHDRLPYQRRYRERRDSDTYRCEERSPSFGEDYYGPSRSRHRRRSRERGPYRTRKHAHHCHKRRTRSCSSASSRSQQSSKRSSRSVEDDKEGHLVCRIGDWLQERYEIVGNLGEGTFGKVVECLDHARGKSQVALKIIRNVGKYREAARLEINVLKKIKEKDKENKFLCVLMSDWFNFHGHMCIAFELLGKNTFEFLKENNFQPYPLPHVRHMAYQLCHALRFLHENQLTHTDLKPENILFVNSEFETLYNEHKSCEEKSVKNTSIRVADFGSATFDHEHHTTIVATRHYRPPEVILELGWAQPCDVWSIGCILFEYYRGFTLFQTHENREHLVMMEKILGPIPSHMIHRTRKQKYFYKGGLVWDENSSDGRYVKENCKPLKSYMLQDSLEHVQLFDLMRRMLEFDPAQRITLAEALLHPFFAGLTPEERSFHTSRNPSR

SEQ ID NO: 16 - DNA, 106 bp, Homo sapiens
cgtgctcagcgacccgcgcaagcgcgagatcttcgaccgctacggggaggaaggcctaaaggggagtggccccagtggcggtagcggcggtggtgccaatggtacc

SEQ ID NO: 17 - DNA, 2242 bp, Homo sapiens
ggagccgggggacggcgacagcgggtcggcgggccgcaggagggggtcatgggtaaagactactaccagacgttgggcctggcccgcggcgcgtcggacgaggagatcaagcgggcctaccgccgccaggcgctgcgctaccacccggacaagaacaaggagcccggcgccgaggagaagttcaaggagatcgctgaggcctacgacgtgctcagcgacccgcgcaagcgcgagatcttcgaccgctacggggaggaaggcctaaaggggagtggccccagtggcggtagcggcggtggtgccaatggtacctctttcagctacacattccatggagaccctcatgccatgtttgctgagttcttcggtggcagaaatccctttgacaccttttttgggcagcggaacggggaggaaggcatggacattgatgacccattctctggcttccctatgggcatgggtggcttcaccaacgtgaactttggccgctcccgctctgcccaagagcccgcccgaaagaagcaagatcccccagtcacccacgaccttcgagtctcccttgaagagatctacagcggctgtaccaagaagatgaaaatctcccacaagcggctaaaccccgacggaaagagcattcgaaacgaagacaaaatattgaccatcgaagtgaagaaggggtggaaagaaggaaccaaaatcactttccccaaggaaggagaccagacctccaacaacattccagctgatatcgtctttgttttaaaggacaagccccacaatatctttaagagagatggctctgatgtcatttatcctgccaggatcagcctccgggaggctctgtgtggctgcacagtgaacgtccccactctggacggcaggacgatacccgtcgtattcaaagatgttatcaggcctggcatgcggcgaaaagttcctggagaaggcctccccctccccaaaacacccgagaaacgtggggacctcattattgagtttgaagtgatcttccccgaaaggattccccagacatcaagaaccgtacttgagcaggttcttccaatatagctatctgagctccccaaggactgaccagggacctttccagagctcaaggatttctggacctttctaccagttgtggaccatgagagggtgggagggcccagggagggctttcgtactgctgaatgttttccagagcatatattacaatctttcaaagtcgcacactagacttcagtggtttttcgagctatagggcatcaggtggtgggaacagcaggaaaaggcattccagtctgccccactgggtctggcagccctcccgggatgggcccacatccacctccagtccctggccaggggtgagaggcagaccagcagatggacttgatccctctgtgtctttttgcttctggctggtagataatgtcaacctgcagtcttgattcccagaccctgtacactcctccttttctgttgtgtgatcagtttgtgctttattctgtatttgtctcccatgtcttgctcttctcctggagaattctgtcttctctttggccatctcaaattgagaacctaaactattcctgcagaactgcctggttggcgtccacaagcaatacctctcgttccagcaggaccaagggagccagcctccagtgagtgactccagcaagtgcagccacctctcccttgatggtctgggagcctggcctcagcaaggggccttcctgacctctggctccagtgaagctgaatgtcctcactttgtgggtcacactctttacatttctgtaaggcaatcttggcacacgtggggcttaccagtggcccaggtaattttttgtttcatggactatggactctttcaaagggatctgatccttttgaattttgcacagccctagatacaatcccttttgataaaagggtctttgcttctgattacaggagcactgtggaacgtctgtaaatatgtttttataattccatgtatagttggtgtacactcaaaacctgtccccggcagccagtgctctctgtatagggccataatggaattctgaagaaatcttggggagggaaggggagttggaacaaatgtctgttccctggaggccagtccagtgctcagacctttagactcattgtaagttgccactgccaacatgagaccaaagtgtgtgactagtcaatgaagtgcgacagcattaaagactgatgctaaacctca

SEQ ID NO: 18 - protein, 340 aa, Homo sapiens
MGKDYYQTLGLARGASDEEIKRAYRRQALRYHPDKNKEPGAEEKFKEIAEAYDVLSDPRKREIFDRYGEEGLKGSGPSGGSGGGANGTSFSYTFHGDPHAMFAEFFGGRNPFDTFFGQRNGEEGMDIDDPFSGFPMGMGGFTNVNFGRSRSAQEPARKKQDPPVTHDLRVSLEEIYSGCTKKMKISHKRLNPDGKSIRNEDKILTIEVKKGWKEGTKITFPKEGDQTSNNIPADIVFVLKDKPHNIFKRDGSDVIYPARISLREALCGCTVNVPTLDGRTIPVVFKDVIRPGMRRKVPGEGLPLPKTPEKRGDLIIEFEVIFPERIPQTSRTVLEQVLPI

SEQ ID NO: 19 - DNA, 108 bp, Homo sapiens
aggagagatcacactttcccagtggataccactcatggaagaaaactgcaggaagtgctccgagaccgctaaagtctgcctccccaagaatttctccataaaagaaat

SEQ ID NO: 20 - DNA, 2776 bp, Homo sapiens
gccctggccttcgcgcatctcccaggttagctgcgtgtccgggtgctaggctgcagacccgccgccatgacgctgcgcgcggccgtcttcgaccttgacggggtgctggcgctgccagcggtgttcggcgtcctcggccgcacggaggaggccctggcgctgcccagaggacttctgaatgatgctttccagaaagggggaccagagggtgccactacccggcttatgaaaggagagatcacactttcccagtggataccactcatggaagaaaactgcaggaagtgctccgagaccgctaaagtctgcctccccaagaatttctccataaaagaaatctttgacaaggcgatttcagccagaaagatcaaccgccccatgctccaggcagctctcatgctcaggaagaaaggattcactactgccatcctcaccaacacctggctggacgaccgtgctgagagagatggcctggcccagctgatgtgtgagctgaagatgcactttgacttcctgatagagtcgtgtcaggtgggaatggtcaaacctgaacctcagatctacaagtttctgctggacaccctgaaggccagccccagtgaggtcgtttttttggatgacatcggggctaatctgaagccagcccgtgacttgggaatggtcaccatcctggtccaggacactgacacggccctgaaagaactggagaaagtgaccggaatccagcttctcaataccccggcccctctgccgacctcttgcaatccaagtgacatgagccatgggtacgtgacagtaaagcccagggtccgtctgcattttgtggagctgggctccggccctgctgtgtgcctctgccatggatttcccgagagttggtattcttggaggtaccagatccctgctctggcccaggcaggttaccgggtcctagctatggacatgaaaggctatggagagtcatctgctcctcccgaaatagaagaatattgcatggaagtgttatgtaaggagatggtaaccttcctggataaactgggcctctctcaagcagtgttcattggccatgactggggtggcatgctggtgtggtacatggctctcttctaccccgagagagtgagggcggtggccagtttgaatactcccttcataccagcaaatcccaacatgtcccctttggagagtatcaaagccaacccagtatttgattaccagctctacttccaagaaccaggagtggctgaggctgaactggaacagaacctgagtcggactttcaaaagcctcttcagagcaagcgatgagagtgttttatccatgcataaagtctgtgaagcgggaggactttttgtaaatagcccagaagagcccagcctcagcaggatggtcactgaggaggaaatccagttctatgtgcagcagttcaagaagtctggtttcagaggtcctctaaactggtaccgaaacatggaaaggaactggaagtgggcttgcaaaagcttgggacggaagatcctgattccggccctgatggtcacggcggagaaggacttcgtgctcgttcctcagatgtcccagcacatggaggactggattccccacctgaaaaggggacacattgaggactgtgggcactggacacagatggacaagccaaccgaggtgaatcagatcctcattaagtggctggattctgatgcccggaacccaccggtggtctcaaagatgtagaacgcagcgtgtgcccacgctcagcaggtgtgccatccttccacctgctggggcaccattcttagtatacagaggtggccttacacacatcttgcatggatggcagcattgttctgaaggggtttgcagaaaaaaaagattttctttacataaagtgaatcaaatttgacattattttagatcccagagaaatcaggtgtgattagttctccaggcatgaatgcatcgtccctttatctgtaagaacccttagtgtcctgtagggggacagaatggggtggccaggtggtgatttctctttgaccaatgcatagtttggcagaaaaatcagccgttcatttagaagaatcttagcagagattgggatgccttactcaataaagctaagatgactatgctgctggctgtctttgttcttggagaggtggagtgactgttcacggagaatgcacggcatggggatgaaccctttccctctgcttttgagccctgttctgggctccaaggtgctgtatgatctaggccgtgctggccaggagacaatcctatggggatggcagtggtgtcttgtgctctgtcccctagagcagtcactggccacaggtagccacctgcctttctcccggcttccctagcagagtttgctcaggcacaaatgtgcacctggagcatttgaaatgtgctagtgaggctgaggaagagaattttaaatttcattgaattgtaatcagtttaaagttaaatagcagcagctgccatgaggctcaggcagatccagctcatcttcccctctgccccctcctccctatcttcccctctaccctctcctgcctcctgtcacatccggttaggctcccatctcactgatgtgtctcctgcagtggtctctcccctgccctgcttccagccccagagtcctggagcagcagcctcctcacgggtcttgccgcccacatggttggatcctgaaactcgcagggcctcccccaactgcccctgcccacccccagcccggccccatcaccctccaattcctaaccgc

SEQ ID NO: 21 - protein, 555 aa, Homo sapiens
MTLRAAVFDLDGVLALPAVFGVLGRTEEALALPRGLLNDAFQKGGPEGATTRLMKGEITLSQWIPLMEENCRKCSETAKVCLPKNFSIKEIFDKAISARKINRPMLQAALMLRKKGFTTAILTNTWLDDRAERDGLAQLMCELKMHFDFLIESCQVGMVKPEPQIYKFLLDTLKASPSEVVFLDDIGANLKPARDLGMVTILVQDTDTALKELEKVTGIQLLNTPAPLPTSCNPSDMSHGYVTVKPRVRLHFVELGSGPAVCLCHGFPESWYSWRYQIPALAQAGYRVLAMDMKGYGESSAPPEIEEYCMEVLCKEMVTFLDKLGLSQAVFIGHDWGGMLVWYMALFYPERVRAVASLNTPFIPANPNMSPLESIKANPVFDYQLYFQEPGVAEAELEQNLSRTFKSLFRASDESVLSMHKVCEAGGLFVNSPEEPSLSRMVTEEEIQFYVQQFKKSGFRGPLNWYRNMERNWKWACKSLGRKILIPALMVTAEKDFVLVPQMSQHMEDWIPHLKRGHIEDCGHWTQMDKPTEVNQILIKWLDSDARNPPVVSKM

SEQ ID NO: 22 - DNA, 102 bp, Homo sapiens
aaccagcgggagagtgagcggatctccagcaatcgggccatcccggacactcgccatctgagatgcacactgctggtgtattgcacggaccttccacccact

SEQ ID NO: 23 - DNA, 2462 bp, Homo sapiens
gtttccctatcggcggcagcgggcaaggcggcggcggcggcggcggcagccgcggtggcggcgtggggaacatctcggcagccaccgcgcttctcccgctggagcgggcgtccagcttggctgccctcggtccttccctgccacgtttcgggtcgccctgcaccccccacccaggctcgcttctcttcgaagcgggaagggcgccttgcaggatcctgccgcccctccaaccggatcctgggtctagagctccccagagcgaggcgctcgccaggactcctgccccgccaaccctgaccgccggggggtgcccccgggacgtagcgccgcggagaggaagcggcaaaggggaccatgcggcgcctgactcgtcggctggttctgccagtcttcggggtgctctggatcacggtgctgctgttcttctgggtaaccaagaggaagttggaggtgccgacgggacctgaagtgcagacccctaaggtttggtccttgtttttcaaggtggctgggatgagcccttgggcgcctcaggtgcctgtatcacccactcctccctaccaaagagggcatcttcctacaggaggacaccttgctgtatgtcatttcccatgtctcttgcaagaagctcagttccatttgcagactcaggtctttcttcaagtcagatgcacactgctggtgtattgcacggaccttccacccactagcatcatcatcaccttccacaacgaggcccgctccacgctgctcaggaccatccgcagtgtattaaaccgcacccctacgcatctgatccgggaaatcatattagtggatgacttcagcaatgaccctgatgactgtaaacagctcatcaagttgcccaaggtgaaatgcttgcgcaataatgaacggcaaggtctggtccggtcccggattcggggcgctgacatcgcccagggcaccactctgactttcctcgacagccactgtgaggtgaacagggactggctccagcctctgttgcacagggtcaaagaggactacacgcgggtggtgtgccctgtgatcgatatcattaacctggacaccttcacctacatcgagtctgcctcggagctcagaggggggtttgactggagcctccacttccagtgggagcagctctccccagagcagaaggctcggcgcctggaccccacggagcccatcaggactcctatcatagctggagggctcttcgtgatcgacaaagcttggtttgattacctggggaaatatgatatggacatggacatctggggtggggagaactttgaaatctccttccgagtgtggatgtgcgggggcagcctagagatcgtcccctgcagccgagtggggcacgtcttccggaagaagcacccctacgttttccctgatggaaatgccaacacgtatataaagaacaccaagcggacagctgaagtgtggatggatgaatacaagcaatactattacgctgcccggccattcgccctggagaggcccttcgggaatgttgagagcagattggacctgaggaagaatctgcgctgccagagcttcaagtggtacctggagaatatctaccctgaactcagcatccccaaggagtcctccatccagaagggcaatatccgacagagacagaagtgcctggaatctcaaaggcagaacaaccaagaaaccccaaacctaaagttgagcccctgtgccaaggtcaaaggcgaagatgcaaagtcccaggtatgggccttcacatacacccagcagatcctccaggaggagctgtgcctgtcagtcatcaccttgttccctggcgccccagtggttcttgtcctttgcaagaatggagatgaccgacagcaatggaccaaaactggttcccacatcgagcacatagcatcccacctctgcctcgatacagatatgttcggtgatggcaccgagaacggcaaggaaatcgtcgtcaacccatgtgagtcctcactcatgagccagcactgggacatggtgagctcttgaggacccctgccagaagcagcaagggccatggggtggtgcttccctggaccagaacagactggaaactgggcagcaagcagcctgcaaccacctcagacatcctggactgggaggtggaggcagagccccccaggacaggagcaactgtctcagggaggacagaggaaaacatcacaagccaatggggctcaaagacaaatcccacatgttctcaaggccgttaagttccagtcctggccagtcattccctgattggtatctggagacagaaacctaatgggaagtgtttattgttccttttcctacaaaggaagcagtctctggaggccagaaagaaaagccttctttttcactaggccaggactacattgagagatgaagaatggaggttgtttccaaaagaaataaagagaaacttagaagttgtctctgga

SEQ ID NO: 24 - protein, 557 aa, Homo sapiens
MRRLTRRLVLPVFGVLWITVLLFFWVTKRKLEVPTGPEVQTPKVWSLFFKVAGMSPWAPQVPVSPTPPYQRGHLPTGGHLAVCHFPCLLQEAQFHLQTQVFLQVRCTLLVYCTDLPPTSIIITFHNEARSTLLRTIRSVLNRTPTHLIREIILVDDFSNDPDDCKQLIKLPKVKCLRNNERQGLVRSRIRGADIAQGTTLTFLDSHCEVNRDWLQPLLHRVKEDYTRVVCPVIDIINLDTFTYIESASELRGGFDWSLHFQWEQLSPEQKARRLDPTEPIRTPIIAGGLFVIDKAWFDYLGKYDMDMDIWGGENFEISFRVWMCGGSLEIVPCSRVGHVFRKKHPYVFPDGNANTYIKNTKRTAEVWMDEYKQYYYAARPFALERPFGNVESRLDLRKNLRCQSFKWYLENIYPELSIPKESSIQKGNIRQRQKCLESQRQNNQETPNLKLSPCAKVKGEDAKSQVWAFTYTQQILQEELCLSVITLFPGAPVVLVLCKNGDDRQQWTKTGSHIEHIASHLCLDTDMFGDGTENGKEIVVNPCESSLMSQHWDMVSS

SEQ ID NO: 25 - DNA, 102 bp, Homo sapiens
cctcaacaagaaggacctgtttgaggagaagatcacacacagtcccctgaccatctgcttccctgagtacacaggggccaacaaatatgatgaggcagccag

SEQ ID NO: 26 - DNA, 2219 bp, Homo sapiens
agtcgctcggaactgccgacccgagtgcttcccgcagagggctggtggtgggagcggagtgggtcgggcggggccgagccgggccgtgggccgtgtgggggccgggcggcggccgggccggcggacggcgggatgggctgcaccgtgagcgccgaggacaaggcggcggccgagcgctctaagatgatcgacaagaacctgcgggaggacggagagaaggcggcgcgggaggtgaagttgctgctgttgggtgctggggagtcagggaagagcaccatcgtcaagcagatgaagatcatccacgaggatggctactccgaggaggaatgccggcagtaccgggcggttgtctacagcaacaccatccagtccatcatggccattgtcaaagccatgggcaacctgcagatcgactttgccgacccctccagagcggacgacgccaggcagctatttgcactgtcctgcaccgccgaggagcaaggcgtgctccctgatgacctgtccggcgtcatccggaggctctgggctgaccatggtgtgcaggcctgctttggccgctcaagggaataccagctcaacgactcagctgcctactacctgaacgacctggagcgtattgcacagagtgactacatccccacacagcaagatgtgctacggacccgcgtaaagaccacggggatcgtggagacacacttcaccttcaaggacctacacttcaagatgtttgatgtgggtggtcagcggtctgagcggaagaagtggatccactgctttgagggcgtcacagccatcatcttctgcgtagccttgagcgcctatgacttggtgctagctgaggacgaggagatgaaccgcatgcatgagagcatgaagctattcgatagcatctgcaacaacaagtggttcacagacacgtccatcatcctcttcctcaacaagaaggacctgtttgaggagaagatcacacacagtcccctgaccatctgcttccctgagtacacaggggccaacaaatatgatgaggcagccagctacatccagagtaagtttgaggacctgaataagcgcaaagacaccaaggagatctacacgcacttcacgtgcgccaccgacaccaagaacgtgcagttcgtgtttgacgccgtcaccgatgtcatcatcaagaacaacctgaaggactgcggcctcttctgaggggcagcggggcctggcgggatgggccaccgccgactttgtaccccccaacccctgaggaagatgggggcaagaagatcacgctccccgcctgttcccccgccgcttttctcctctttcctctctttgttctcagctccccctgtcccctcagctccagacgtaggggaggggttgccacaggcctccctgtttgaagcctgcccttgtctgagatgctggtaatggccatggtacccccttctgggcatctgttctggtttttaaccattgtcttgttctgtgatgaggggaggggggcacatgctgagtctcccaaggctgcgtctggaggggcccctgcttctccagcctggacccccagctttgcccaacaccagcccctgccccagcccaagtccaaatgtttacagggagcctcctgcccagtcccccaaccccagccgctcggaggccccaaaggaaaaagcacaagaagcgtgagacgccaccattcctggaaaccacagtccacctgctcattctcgtagctttttaaaaaaatgaaagtaaaggaaaaaaaaaaaactgcaaatctagaaaactttttagagaaaaactatttaaaactgtcagatcctgaccagcaagcccccccccagccccccttccaagtgactccgtgccttgagtgtgtctgcgtgtttacacccgtccctctgctggccgcccccgtgcgagcggcacccctgccctgccctccacagaattgggttccaagggctgttccagacaactgccaacgtcactgagggccctgccccagcggccctggccccaggctctattaacctaaaatgtagctccctagcgctaacctaggaaccgccgctgcctgctggggggccacgcccctcatgcccttgtcccaggcccggggccttcagcgttgaacacttccttgcttttttcacatgttttatggaattgttcacctggtttgaaataataaaatgtagaaagaaaaaaaataccgagaa

SEQ ID NO: 27 - protein, 355 aa, Homo sapiens
MGCTVSAEDKAAAERSKMIDKNLREDGEKAAREVKLLLLGAGESGKSTIVKQMKIIHEDGYSEEECRQYRAVVYSNTIQSIMAIVKAMGNLQIDFADPSRADDARQLFALSCTAEEQGVLPDDLSGVIRRLWADHGVQACFGRSREYQLNDSAAYYLNDLERIAQSDYIPTQQDVLRTRVKTTGIVETHFTFKDLHFKMFDVGGQRSERKKWIHCFEGVTAIIFCVALSAYDLVLAEDEEMNRMHESMKLFDSICNNKWFTDTSIILFLNKKDLFEEKITHSPLTICFPEYTGANKYDEAASYIQSKFEDLNKRKDTKEIYTHFTCATDTKNVQFVFDAVTDVIIKNNLKDCGLF

SEQ ID NO: 28 - DNA, 102 bp, Homo sapiens
gaattcatgcatgatcatgctgattatggctttccaagttgtgagggtaaattcaattggcgtgttattaaggaaaagcgggatgcctatgtgagccgcctg

SEQ ID NO: 29 - DNA, 3034 bp, Homo sapiens
cttccgcgtgcatggccctgctgccccgagccctgagcgccggcgcgggaccgagctggcggcgggcggcgcgcgccttccgaggcttcctgctgcttctgcccgagcccgcggccctcacgcgcgccctctcccgtgccatggcctgcaggcaggagccgcagccgcagggcccgccgcccgctgctggcgccgtggcctcctatgactacctggtgatcgggggcggctcgggcgggctggccagcgcgcgcagggcggccgagctgggtgccagggccgccgtggtggagagccacaagctgggtggcacttgcgtgaatgttggatgtgtacccaaaaaggtaatgtggaacacagctgtccactctgaattcatgcatgatcatgctgattatggctttccaagttgtgagggtaaattcaattggcgtgttattaaggaaaagcgggatgcctatgtgagccgcctgaatgccatctatcaaaacaatctcaccaagtcccatatagaaatcatccgtggccatgcagccttcacgagtgatcccaagcccacaatagaggtcagtgggaaaaagtacaccgccccacacatcctgatcgccacaggtggtatgccctccacccctcatgagagccagatccccggtgccagcttaggaataaccagcgatggattttttcagctggaagaattgcccggccgcagcgtcattgttggtgcaggttacattgctgtggagatggcagggatcctgtcagccctgggttctaagacatcactgatgatacggcatgataaggtacttagaagttttgattcaatgatcagcaccaactgcacggaggagctggagaacgctggcgtggaggtgctgaagttctcccaggtcaaggaggttaaaaagactttgtcgggcttggaagtcagcatggttactgcagttcccggtaggctaccagtcatgaccatgattccagatgttgactgcctgctctgggccattgggcgggtcccgaataccaaggacctgagtttaaacaaactggggattcaaaccgatgacaagggtcatatcatcgtagacgaattccagaataccaacgtcaaaggcatctatgcagttggggatgtatgtggaaaagctcttcttactccagttgcaatagctgctggccgaaaacttgcccatcgactttttgaatataaggaagattccaaattagattataacaacatcccaactgtggtcttcagccacccccctattgggacagtgggactcacggaagatgaagccattcataaatatggaatagaaaatgtgaagacctattcaacgagctttaccccgatgtatcacgcagttaccaaaaggaaaacaaaatgtgtgatgaaaatggtctgtgctaacaaggaagaaaaggtggttgggatccatatgcagggacttgggtgtgatgaaatgctgcagggttttgctgttgcagtgaagatgggagcaacgaaggcagactttgacaacacagtcgccattcaccctacctcttcagaagagctggtcacacttcgttgagaaccaggagacacgtgtggcgggcagtgggacccatagatcttctgaaatgaaacaaataatcacattgacttactgtttgagttttatgtatttctttattttaatcaggatcttctgatagtggaaatttttagtacataatagaacttatttatggagttagaaatttgtagtgttatccaggattgattttcatttgatcacatctcacagtaattaatattttcaagttttttttttattaacagctctgtgctagttttttttttctgttttagcctcatcccaaatataaagctttgtgaagtacaattaacttaatgtacttgaatgaatagaacttgctactttttttttttttttttttgagacagagttttgctctcattgcccaggctggagtgcggtggtgctatttcagctcaccacaacctctgcctcctgggttcaagtgattctcctgccttagcctcccgaatagctggaattacaggcacgcaccaccatgcctgactaattttgtatttttagtagacatggggtttctccatgttggtcaggctggtctcaaactcccaccttcaggtgatccgcccacctcggcctcctgaggtgctgagattacaggcgtgagccactgtgccagcttgctaattttcacagaagttgatggcaattcttcacatgtaaacagtgccagtgcacagaacctttatatattttttgaagccagtactgtgctctgcatataacaaagctgcttcaaggatgagacctttttctaaaagcatgtaatgtgagaagccggcctgccttattttcttttttcttttttaatgattaaaaatagtttgtggcaaggcacggtggctcaggcctgtaattctagcactttgggaggccgaggcaggaggattacttgagcctacaagtttgaggccagcatgcacagcatagcaagactgcatctctacagagagtaaaaaaaattacccgagtgtggtgatgtgcatctgtaatctcagctacttgggaggctgaggtgagaggatcacttgagcttgggtgaggtgaggctgcagtgagtcctgatcatgctgctgcactcaatcttggacaacagagcaagaccctgtctcaaaaaaaaaaaaaaaaaatatatatatatatatatattatttttatgaggtgaagtgcatcaaacttgggaaagatttgaggaggctgggaacctcctggaaaaccactccttgaagaaagatatgagagacatttagaagtgattcctgctttcagaaggaggtggattcaaatacatcaaaagtcccttcctctgctaagtgtttatagttcaatgaataatttcaatatttgtatgtgttcttgtcattttatttttttctgaaaaacttccaaaaatttgaaaataaaattacagccttttcttctta

SEQ ID NO: 30 - protein, 522 aa, Homo sapiens
MALLPRALSAGAGPSWRRAARAFRGFLLLLPEPAALTRALSRAMACRQEPQPQGPPPAAGAVASYDYLVIGGGSGGLASARRAAELGARAAVVESHKLGGTCVNVGCVPKKVMWNTAVHSEFMHDHADYGFPSCEGKFNWRVIKEKRDAYVSRLNAIYQNNLTKSHIEIIRGHAAFTSDPKPTIEVSGKKYTAPHILIATGGMPSTPHESQIPGASLGITSDGFFQLEELPGRSVIVGAGYIAVEMAGILSALGSKTSLMIRHDKVLRSFDSMISTNCTEELENAGVEVLKFSQVKEVKKTLSGLEVSMVTAVPGRLPVMTMIPDVDCLLWAIGRVPNTKDLSLNKLGIQTDDKGHIIVDEFQNTNVKGIYAVGDVCGKALLTPVAIAAGRKLAHRLFEYKEDSKLDYNNIPTVVFSHPPIGTVGLTEDEAIHKYGIENVKTYSTSFTPMYHAVTKRKTKCVMKMVCANKEEKVVGIHMQGLGCDEMLQGFAVAVKMGATKADFDNTVAIHPTSSEELVTLR

SEQ ID NO: 31 - DNA, 106 bp, Homo sapiens
cacattctcaggaactctccttctttgggtctggctgaagttgaggatctcttactctctaggccacggaattaacccgagcaggcatggaggcctctgctctcac

SEQ ID NO: 32 - DNA, 652 bp, Homo sapiens
aacacatccaagcttaagacggtgaggtcagcttcacattctcaggaactctccttctttgggtctggctgaagttgaggatctcttactctctaggccacggaattaacccgagcaggcatggaggcctctgctctcacctcatcagcagtgaccagtgtggccaaagtggtcagggtggcctctggctctgccgtagttttgcccctggccaggattgctacagttgtgattggaggagttgtggccatggcggctgtgcccatggtgctcagtgccatgggcttcactgcggcgggaatcgcctcgtcctccatagcagccaagatgatgtccgcggcggccattgccaatgggggtggagttgcctcgggcagccttgtggctactctgcagtcactgggagcaactggactctccggattgaccaagttcatcctgggctccattgggtctgccattgcggctgtcattgcgaggttctactagctccctgcccctcgccctgcagagaagagaaccatgccaggggagaaggcacccagccatcctgacccagcgaggagccaactatcccaaatatacctggggtgaaatataccaaattctgcatctccagaggaaaataagaaataaagatgaattgttgcaa

SEQ ID NO: 33 - protein, 122 aa, Homo sapiens
MEASALTSSAVTSVAKVVRVASGSAVVLPLARIATVVIGGVVAMAAVPMVLSAMGFTAAGIASSSIAAKMMSAAAIANGGGVASGSLVATLQSLGATGLSGLTKFILGSIGSAIAAVIARFY

SEQ ID NO: 34 - DNA, 109 bp, Homo sapiens
tgccatttaaggatcccaactttgtgcactctggccacggtggcgcagtagctggcaagaagaacagaacctggaagaacctgaaacaaatcctcgcttctgaaagggc

SEQ ID NO: 35 - DNA, 1051 bp, Homo sapiens
atcaagacggaagtaacagcggaaaggaagttccaaggcccgcgctgggaaaaaggtggggggaccaggggaagactcggagtgcgatggcggcgcaaattccaattgtggccaccacttccactcccggaatagtccggaacagcaagaagaggccggccagcccttcccacaatggcagcagcggcgggggctatggcgccagtaagaagaaaaaagcgtccgcttccagctttgcgcagacgtgcctttcgccttccaccatgattgtgaggcctccccagccacgtggaactacgtgcctcttgccttccgccatgattgtgaggcctccccagccgcgtggaaatggtatcagcatggaagccatgagtgagaataaaatggtgccctctgagtttagcacaggacctgtggaaaaagctgccaaacctttgccatttaaggatcccaactttgtgcactctggccacggtggcgcagtagctggcaagaagaacagaacctggaagaacctgaaacaaatcctcgcttctgaaagggcattgccgtggcaactgaacgatcctaactacttcagtattgatgctcctccatcctttaagccagctaagaagtattctgatgtttcaggtctgcttgccaactacacagacccccagagcaaactgcggttcagcaccattgaagagttttcctacattcggaggctgccctctgacgtcgtcaccggctacctggccctgaggaaggccacgagcatcgttccctgagccccagaaagggagatgaagtggaaagctgtttcaaaaacagactctggactcatgattttgtttcacggaaacaaactcgttctgctgtcaatctgaaaatgccagtgctgtgccttggaaagaatgtttggctttaatttaagggttttttttttttttagtgtgtgttttccctccaagtgtgatatttcctgctgaattaaattatacttcagttgttgcctcaagtaaaggtgtttgacaagaagatacaataaaaccatacttttcattta

SEQ ID NO: 36 - protein, 228 aa, Homo sapiens
MAAQIPIVATTSTPGIVRNSKKRPASPSHNGSSGGGYGASKKKKASASSFAQTCLSPSTMIVRPPQPRGTTCLLPSAMIVRPPQPRGNGISMEAMSENKMVPSEFSTGPVEKAAKPLPFKDPNFVHSGHGGAVAGKKNRTWKNLKQILASERALPWQLNDPNYFSIDAPPSFKPAKKYSDVSGLLANYTDPQSKLRFSTIEEFSYIRRLPSDVVTGYLALRKATSIVP

SEQ ID NO: 37 - DNA, 103 bp, Homo sapiens
ttcccaaaactgaggatcctggaggtgccttatgcctaccagtgctgtccctatgggatgtgtgccagcttcttcaaggcctctgggcagtgggaggctgaag

SEQ ID NO: 38 - DNA, 3458 bp, Homo sapiens
atgcccagcccgccggggctccgggcgctatggctttgcgccgcgctgtgcgcttcccggagggccggcggcgccccccagcccggcccggggcccaccgcctgcccggccccctgccactgccaggaggacggcatcatgctgtctgccgactgctctgagctcgggctgtccgccgttccgggggacctggaccccctgacggcttacctggacctcagcatgaacaacctcacagagcttcagcctggcctcttccaccacctgcgcttcttggaggagctgcgtctctctgggaaccatctctcacacatcccaggacaagcattctctggtctctacagcctgaaaatcctgatgctgcagaacaatcagctgggaggaatccccgcagaggcgctgtgggagctgccgagcctgcagtcgctgcgcctagatgccaacctcatctccctggtcccggagaggagctttgaggggctgtcctccctccgccacctctggctggacgacaatgcactcacggagatccctgtcagggccctcaacaacctccctgccctgcaggccatgaccctggccctcaaccgcatcagccacatccccgactacgcgttccagaatctcaccagccttgtggtgctgcatttgcataacaaccgcatccagcatctggggacccacagcttcgaggggctgcacaatctggagacactagacctgaattataacaagctgcaggagttccctgtggccatccggaccctgggcagactgcaggaactggggttccataacaacaacatcaaggccatcccagaaaaggccttcatggggaaccctctgctacagacgatacacttttatgataacccaatccagtttgtgggaagatcggcattccagtacctgcctaaactccacacactatctctgaatggtgccatggacatccaggagtttccagatctcaaaggcaccaccagcctggagatcctgaccctgacccgcgcaggcatccggctgctcccatcggggatgtgccaacagctgcccaggctccgagtcctggaactgtctcacaatcaaattgaggagctgcccagcctgcacaggtgtcagaaattggaggaaatcggcctccaacacaaccgcatctgggaaattggagctgacaccttcagccagctgagctccctgcaagccctggatcttagctggaacgccatccggtccatccaccccgaggccttctccaccctgcactccctggtcaagctggacctgacagacaaccagctgaccacactgcccctggctggacttgggggcttgatgcatctgaagctcaaagggaaccttgctctctcccaggccttctccaaggacagtttcccaaaactgaggatcctggaggtgccttatgcctaccagtgctgtccctatgggatgtgtgccagcttcttcaaggcctctgggcagtgggaggctgaagaccttcaccttgatgatgaggagtcttcaaaaaggcccctgggcctccttgccagacaagcagagaaccactatgaccaggacctggatgagctccagctggagatggaggactcaaagccacaccccagtgtccagtgtagccctactccaggccccttcaagccctgtgagtacctctttgaaagctggggcatccgcctggccgtgtgggccatcgtgttgctctccgtgctctgcaatggactggtgctgctgaccgtgttcgctggcgggcctgtccccctgcccccggtcaagtttgtggtaggtgcgattgcaggcgccaacaccttgactggcatttcctgtggccttctagcctcagtcgatgccctgacctttggtcagttctctgagtacggagcccgctgggagacggggctaggctgccgggccactggcttcctggcagtacttgggtcggaggcatcggtgctgctgctcactctggccgcagtgcagtgcagcgtctccgtctcctgtgtccgggcctatgggaagtccccctccctgggcagcgttcgagcaggggtcctaggctgcctggcactggcagggctggccgccgcgctgcccctggcctcagtgggagaatacggggcctccccactctgcctgccctacgcgccacctgagggtcagccagcagccctgggcttcaccgtggccctggtgatgatgaactccttctgtttcctggtcgtggccggtgcctacatcaaactgtactgtgacctgccgcggggcgactttgaggccgtgtgggactgcgccatggtgaggcacgtggcctggctcatcttcgcagacgggctcctctactgtcccgtggccttcctcagctttgcctccatgctgggcctcttccctgtcacgcccgaggccgtcaagtctgtcctgctggtggtgctgcccctgcctgcctgcctcaacccactgctgtacctgctcttcaacccccacttccgggatgaccttcggcggcttcggccccgcgcaggggactcagggcccctagcctatgctgcggccggggagctggagaagagctcctgtgattctacccaggccctggtagccttctctgatgtggatctcattctggaagcttctgaagctgggcggccccctgggctggagacctatggcttcccctcagtgaccctcatctcctgtcagcagccaggggcccccaggctggagggcagccattgtgtagagccagaggggaaccactttgggaacccccaaccctccatggatggagaactgctgctgagggcagagggatctacgccagcaggtggaggcttgtcagggggtggcggctttcagccctctggcttggcctttgcttcacacgtgtaaatatccctccccattcttctcttcccctctcttccctttcctctctccccctcggtgaatgatggctgcttctaaaacaaatacaaccaaaactcagcagtgtgatctatagcaggatggcccagtccctggctccactgatcacctctctcctgtgaccatcaccaacgggtgcctcttggcctggctttcccttggccttcctcagcttcaccttgatactgggcctcttccttgtcatgtctgaagctgtggaccagagacctggacttttgtctgcttaagggaaatgagggaagtaaagacagtgaaggggtggagggttgatcagggcacagtggacagggagacctcacagagaaaggcctggaaggtgatttcccgtgtgactcatggataggatacaaaatgtgttccatgtaccattaatcttgacatatgccatgcataaagacttcctattaaaataagctttggaagagattacacatgatgtctttttcttagagattcacagtgcatgttagtgtaataaagagataagtcctacagta

SEQ ID NO: 39 - protein, 967 aa, Homo sapiens
MPSPPGLRALWLCAALCASRRAGGAPQPGPGPTACPAPCHCQEDGIMLSADCSELGLSAVPGDLDPLTAYLDLSMNNLTELQPGLFHHLRFLEELRLSGNHLSHIPGQAFSGLYSLKILMLQNNQLGGIPAEALWELPSLQSLRLDANLISLVPERSFEGLSSLRHLWLDDNALTEIPVRALNNLPALQAMTLALNRISHIPDYAFQNLTSLVVLHLHNNRIQHLGTHSFEGLHNLETLDLNYNKLQEFPVAIRTLGRLQELGFHNNNIKAIPEKAFMGNPLLQTIHFYDNPIQFVGRSAFQYLPKLHTLSLNGAMDIQEFPDLKGTTSLEILTLTRAGIRLLPSGMCQQLPRLRVLELSHNQIEELPSLHRCQKLEEIGLQHNRIWEIGADTFSQLSSLQALDLSWNAIRSIHPEAFSTLHSLVKLDLTDNQLTTLPLAGLGGLMHLKLKGNLALSQAFSKDSFPKLRILEVPYAYQCCPYGMCASFFKASGQWEAEDLHLDDEESSKRPLGLLARQAENHYDQDLDELQLEMEDSKPHPSVQCSPTPGPFKPCEYLFESWGIRLAVWAIVLLSVLCNGLVLLTVFAGGPVPLPPVKFVVGAIAGANTLTGISCGLLASVDALTFGQFSEYGARWETGLGCRATGFLAVLGSEASVLLLTLAAVQCSVSVSCVRAYGKSPSLGSVRAGVLGCLALAGLAAALPLASVGEYGASPLCLPYAPPEGQPAALGFTVALVMMNSFCFLVVAGAYIKLYCDLPRGDFEAVWDCAMVRHVAWLIFADGLLYCPVAFLSFASMLGLFPVTPEAVKSVLLVVLPLPACLNPLLYLLFNPHFRDDLRRLRPRAGDSGPLAYAAAGELEKSSCDSTQALVAFSDVDLILEASEAGRPPGLETYGFPSVTLISCQQPGAPRLEGSHCVEPEGNHFGNPQPSMDGELLLRAEGSTPAGGGLSGGGGFQPSGLAFASHV

SEQ ID NO: 40 - DNA, 102 bp, Homo sapiens
ttttgcacggaagacagaaagagatgaactcttaaaggacttgcaacaaagcattgccagagaacctagtgctccttcaattcctacacctgcgtatcagtc

SEQ ID NO: 41 - DNA, 5987 bp, Homo sapiens
gctggagctcccggaagttgccggacccggaacgcaggcggagcgcaagtctgtcagccagtcagtccgccagtccgccagcccagtacctctctctcctcggccctcgtaagctgtccgcggtctgtttggcccgaacggcggcggaggcgctgatcatggcgacattcatctcggtgcagctgaaaaagacctcagaggtggacctggccaagccgctggtgaagttcatccagcagacttacccaagcggcggggaagagcaggcccagtactgccgcgcggcggaggagctcagcaagctgcgccgcgccgcagtcggtcgtccgctggacaagcacgagggcgcgctcgagacgctcctgagatattatgatcagatttgttctattgaacccaaattcccattttctgaaaatcagatctgcttgacatttacctggaaggatgctttcgataaaggttcactttttggaggctctgtaaaactggctcttgcaagcttaggatatgaaaagagctgtgtgttgttcaattgtgcagccttagctagccaaattgcagcagaacagaacctggataatgatgaaggattgaaaatcgctgctaaacattaccagtttgctagtggtgcctttttacatattaaagagacggttttatctgccttaagtcgagagccgaccgtggacatatctccagatactgttgggaccctcagtcttattatgctggcacaggctcaagaagtattttttttaaaagccacaagagataaaatgaaagatgccatcatagctaaattggctaatcaggctgcagattattttggtgatgctttcaaacagtgtcaatacaaagatactctccccaagtatttttatttccaggaggtgttccctgtcttggctgcaaagcactgtatcatgcaggccaatgctgagtaccatcagtctatcctggcaaaacagcagaagaaatttggagaagaaattgcaaggttacagcatgcagcagaactgattaaaacagtggcatctcgctatgatgaatatgttaatgtgaaggatttttctgacaaaatcaatcgtgcccttgctgcagcaaagaaggataatgacttcatttatcatgatcgagttccagaccttaaagatctagatcctattggcaaagccacacttgtgaaatctaccccggtcaatgtacccatcagtcagaaatttactgatctgtttgagaagatggttcccgtgtcagtacagcagtctttggctgcctataatcagaggaaagccgatttggttaacagatcaattgctcagatgagagaagccaccactttggcaaatggggtgctagcttcccttaatcttccagcagcaattgaagatgtgtctggagacactgtacctcagtctatattgactaaatccagatctgtgattgaacagggaggcatccagactgttgatcagttgattaaagaactgcctgaattactgcaacgaaatagagaaatcctagatgagtcattaaggttgttggatgaagaagaagcaaccgataatgatttaagagcaaaatttaaggaacgttggcaaaggacaccatccaatgaactgtataagcctttaagagcagagggaaccaacttcagaacagttttagataaagctgtgcaggcagatggacaagtgaaagaatgttaccagtctcatcgtgacaccatcgtgcttttgtgtaagccagagcctgagctgaatgctgccatcccttctgctaatccagcaaagaccatgcagggcagtgaggttgtaaatgtcttaaaatccttattgtcaaatcttgatgaagtaaagaaggaaagagagggtctggagaatgacttgaaatctgtgaattttgacatgacaagcaagtttttgacagccctggctcaagatggtgtgataaatgaagaagctctttctgttactgaactagatcgagtctatggaggtcttacaactaaagtccaagaatctctaaagaaacaggagggacttcttaaaaatattcaggtctcacatcaggaattttcaaaaatgaaacaatctaataatgaagctaacttaagagaagaagttttgaagaatttagctactgcatatgacaactttgttgaacttgtagctaatttgaaggaaggcacaaagttttacaatgagttgactgaaatcctggtcaggttccagaacaaatgcagtgatatagtttttgcacggaagacagaaagagatgaactcttaaaggacttgcaacaaagcattgccagagaacctagtgctccttcaattcctacacctgcgtatcagtcctcaccagcaggaggacatgcaccaactcctccaactccagcgccaagaaccatgccgcctactaagccccagcccccagccaggcctccaccacctgtgcttccagcaaatcgagctccttctgctactgctccatctccagtgggggctgggactgctgcgccagctccatcacaaacgcctggctcagctcctcctccacaggcgcagggaccaccctatcccacctatccaggatatcctgggtattgccaaatgcccatgcccatgggctataatccttatgcgtatggccagtataatatgccatatccaccagtgtatcaccagagtcctggacaggctccatacccgggaccccagcagccttcataccccttccctcagcccccacagcagtcttactatccacagcagtaatatgtctgctcagcagctcagctgattcagatcagagggaaagaaataccaaccctgcaataagtgtactaaactctacgctctggttaatgtaatgtactctcctggactgaatgcagtgtataatttctgtctacagctagaagctgtgccccagttccacatttgattacacatgtgagatttgctgctgttgcagtataaacactaggtataataggatttgaaattgcattacagttcataaaaattgaaaatgagaaattaaacctgcaagtgaaacatttgaaacgattatactttctacataagacatggttgggacatcagatacttacaaagatggtttaagtatggatactagagaaaattaagttttctttctctttggtttattgatttggtttaatttccattatgctattttgcataatcaaggcactgtaaatcttataattttaaaataaattacttaagaacagttgtcattgttatgttttgttattgattctcattactgtctaattttttttctggtattagtctcattttgtatgtatataagttaaacagatactgtttttaagtgcatgaatagtacaagttattatcaaggatgttttacagggaaatcaaaagaatattatcatactttatctttcgtatgctgattagtaaacgatttttgacatttattttagaaagtcctataatgtggaagaaacaaacagttgctaccaaagattcttcaaataaacatacaaataaatgtgtatatttaatgttttattgttagcttctccagaaaattgatgcaaattctggtaataattcttgcattttttccccataacctggttaaaataaatacgccattggcaatacttcataatgtaatggaattgtttggggaacacttactgtaccctctcatcctttttccaccttactgtgttaacttagtgacatttaatgcccaatatgtatgaatagatctaagccatttaattttttttccttaaagattggagtattttataattcaaggagcatacaaaacaatggttgggaacatatgccaattatggaataggctatgtatttaatattaatctctgccattaggatatctactcactgtataaacctcagtaaaaatagtgaagacatgcatcatggaatgagaaaatgagaaaggaatgagttgtctaacatcacagtgggatctgttttttgtgaggttcatttctgaacacattaggcatatgagcagatttccagtgaatctatttatgtttattttctgagtttcaacgctgaccttttcttgcattattgtttcattttaatgatagtgttacttgtcccactgttgttttcattgagtttggatttatattttaaatgttcgaatgaaagtatgattgtaaaagggagtgaattggtttaaaaatatatgtatattttaaactttgttgtgtgtaggaaacatgaaggcatgttaattcaatataaatgacctttgatttcatggaatattaaagttggtttaaagtccaatagttaaaccttagcaaaaatagctttttacttcatcagttgctaagatttaatactttggattcatcaaagtgtgacatgggcttgtttgacttctgtaagtggcatttaagttccacattcttattacttgaggtactttatactaacataagacagtgagagttagaggtattacaagttgctagtttataatgtcttactaatgcagaaacaaggaaaaaagcaaaattggcctgaatattctcttggggaaagagggcaccaaagaaaagggtaagtgcatctgagggccaaaagagatgtataagccttttagcccattccccatgctgggcctgctcacagagccacaggaagatcattcagaaactaggaaaggaggcccccacagctgatcctgccacagcacacctgactcactcggctctgttagtgtaaccttttaaatgtagcaacacaaaccctttccctcttgtcagttcactcatcctttggtttctttttaatcacctgtgtctgggcacagacaatcacaataaatgcagccctttattactgttaaggatcatactgttggtttggagttggaagggtactactctgtgattcaggtgtgttgtacccatatttataattaggctttattatcttcctaaatcaaggaaaggaaatcatccccagaccatttatgctgagctttggaatactattttaaactggattgtacttaaataatgaagctctgcatagaggaactagtcagaagtggggaaaacactgtctaatttttatcagtctggtataaagtattgatctaagagaactctccctgtgccccttggtctttattctcaattaagaaaaacagtcacatgtcacgacaaaccaatcaatctttatgagatattcctgtatccataccccagcttgtttgcaatttataaacctccccttcaaaactaaggagttgcagaaaaaaatggatttcacagagccttgtgtccctaaagttctgtcccagtcagcagtctttatagtccaaacagattataaaaaatgttttccatttgaactttacagtttgcaaaagtgcttttatacattttctaatttcagaaacaggataatttgttaagtgggtttcagtttgctaatagggattttttgtgttttgttttttaattttcagcatctcttgaagaatcttgctacagccaaatggcatctcactttttaaagacgtttgcaattattagttgattcacagtacagaacaaggtataaaggaaaaaaccctgctaggtagtgttataattgctagattaaaaatagactagaacaggttcattttaagatttacttggaagagcaaagaaggaaaaattatatttttaaagaaagagaatattcaggctttatttctggtatgaagtttatattttttaaaaaaatcctatattatcacaccagagattttagattcttttctggttagaaacattgctggtagttggattatatttttattgtattcatttatcttagggggaacattgtaaagaaacaaaaaggtccagatgaatgtatgctagaaataaaagttgaaagattcttacttcaaaaaaaaaaaaaaaaaaaaaaaaa

SEQ ID NO: 42 - protein, 873 aa, Homo sapiens
MATFISVQLKKTSEVDLAKPLVKFIQQTYPSGGEEQAQYCRAAEELSKLRRAAVGRPLDKHEGALETLLRYYDQICSIEPKFPFSENQICLTFTWKDAFDKGSLFGGSVKLALASLGYEKSCVLFNCAALASQIAAEQNLDNDEGLKIAAKHYQFASGAFLHIKETVLSALSREPTVDISPDTVGTLSLIMLAQAQEVFFLKATRDKMKDAIIAKLANQAADYFGDAFKQCQYKDTLPKYFYFQEVFPVLAAKHCIMQANAEYHQSILAKQQKKFGEEIARLQHAAELIKTVASRYDEYVNVKDFSDKINRALAAAKKDNDFIYHDRVPDLKDLDPIGKATLVKSTPVNVPISQKFTDLFEKMVPVSVQQSLAAYNQRKADLVNRSIAQMREATTLANGVLASLNLPAAIEDVSGDTVPQSILTKSRSVIEQGGIQTVDQLIKELPELLQRNREILDESLRLLDEEEATDNDLRAKFKERWQRTPSNELYKPLRAEGTNFRTVLDKAVQADGQVKECYQSHRDTIVLLCKPEPELNAAIPSANPAKTMQGSEVVNVLKSLLSNLDEVKKEREGLENDLKSVNFDMTSKFLTALAQDGVINEEALSVTELDRVYGGLTTKVQESLKKQEGLLKNIQVSHQEFSKMKQSNNEANLREEVLKNLATAYDNFVELVANLKEGTKFYNELTEILVRFQNKCSDIVFARKTERDELLKDLQQSIAREPSAPSIPTPAYQSSPAGGHAPTPPTPAPRTMPPTKPQPPARPPPPVLPANRAPSATAPSPVGAGTAAPAPSQTPGSAPPPQAQGPPYPTYPGYPGYCQMPMPMGYNPYAYGQYNMPYPPVYHQSPGQAPYPGPQQPSYPFPQPPQQSYYPQQ

SEQ ID NO: 43 - DNA, 106 bp, Homo sapiens
ggtgattgatgaggagcttctgggagatggacacagctatagtcctagagctattcattcatggctgaccagggccatgtacagccggcgctcgaagatgaaccct

SEQ ID NO: 44 - DNA, 918 bp, Homo sapiens
gctaccgtgactaagatggaagcgtttttggggtcgcggtccggactttgggcggggggtccggccccaggacagttttaccgcattccgtccactcccgattccttcatggatccggcgtctgcactttacagaggtccaatcacgcggacccagaaccccatggtgaccgggacctcagtcctcggcgttaagttcgagggcggagtggtgattgccgcagacatgctgggatcctacggctccttggctcgtttccgcaacatctctcgcattatgcgagtcaacaacagtaccatgctgggtgcctctggcgactacgctgatttccagtatttgaagcaagttctcggccagatggtgattgatgaggagcttctgggagatggacacagctatagtcctagagctattcattcatggctgaccagggccatgtacagccggcgctcgaagatgaaccctttgtggaacaccatggtcatcggaggctatgctgatggagagagcttcctcggttatgtggacatgcttggtgtagcctatgaagccccttcgctggccactggttatggtgcatacttggctcagcctctgctgcgagaagttctggagaagcagccagtgctaagccagaccgaggcccgcgacttagtagaacgctgcatgcgagtgctgtactaccgagatgcccgttcttacaaccggtttcaaatcgccactgtcaccgaaaaaggtgttgaaatagagggaccattgtctacagagaccaactgggatattgcccacatgatcagtggctttgaatgaaatacagatgcattatccagaactgaagttgccctacttttaactttgaacttggctagttcaaagatagactcttcttttgtaaagtaaataaattcttcaaaatgc

SEQ ID NO: 45 - protein, 264 aa, Homo sapiens
MEAFLGSRSGLWAGGPAPGQFYRIPSTPDSFMDPASALYRGPITRTQNPMVTGTSVLGVKFEGGVVIAADMLGSYGSLARFRNISRIMRVNNSTMLGASGDYADFQYLKQVLGQMVIDEELLGDGHSYSPRAIHSWLTRAMYSRRSKMNPLWNTMVIGGYADGESFLGYVDMLGVAYEAPSLATGYGAYLAQPLLREVLEKQPVLSQTEARDLVERCMRVLYYRDARSYNRFQIATVTEKGVEIEGPLSTETNWDIAHMISGFE

SEQ ID NO: 46 - DNA, 107 bp, Homo sapiens
cgtcccagctgtaccacagttgcccagctctgatgcttttgctgctgtggctcagctgtttcagacaactcaaggccaacagcttcagcagatccttcagacttttc

SEQ ID NO: 47 - DNA, 4269 bp, Homo sapiens
agggtgccccgcgcggcgtggactcgggccgctgccgccatcccgctggagagagggagagagaggcccgcccgctcgccggccgggccagtgtgagccagtgcgtgagggcgcggggggccgtgtcagcgagacgcagagcgcagccgccaccaccaaacggacatgttgaagaccagcgctgccgccgcctccttttcctcatcctgcgaacgggactgagagggggcccgccacctctccgcctctgcctcggccgcccgcctcgccgcttcgggcgcagcctcttcctgcccgggcctcggactccgccgctcgtcgcctccccccggccaccaggcccggctggtttcccagccccgctccgccgcggcgcgaggtctatgtgaccggcgggcccggagcagccgccgccgcagcgcgaacatggacgccgtcaacgccttcaaccaggagctcttttcgcttatggatatgaaacctcccatctctagagccaagatgattctcatcactaaagctgctattaaagctattaagctttataagcatgtagttcaaatagtagaaaagttcatcaaaaagtgtaaaccagaatacaaggttccgggattatatgtaattgactcaattgtgcgacagtctcgtcatcagtttggaactgataaagatgtttttgggccaagattctctaaaaacataactgccacattccaatatttatatctttgtccatctgaagataagagtaaaatagttcgtgtgctgaacctttggcaaaaaaatggagtgttcaaaattgaaattattcaacctcttttggacatggcagcgggaaccagtaatgcagccccagtagcagaaaatgttaccaataatgaaggctcacctccacctccagtaaaagtttcttctgaacctcccacacaagccactccaaactccgtcccagctgtaccacagttgcccagctctgatgcttttgctgctgtggctcagctgtttcagacaactcaaggccaacagcttcagcagatccttcagacttttcaacagcctccaaaaccacagtctcctgcccttgacaatgctgtgatggctcaggttcaggctatcacagctcagttaaagacaactcctacacaaccatctgaacaaaaagctgctttccccccacctgaacagaaaactgcatttgacaagaagttgcttgatagatttgactatgatgatgagccagaagctgtggaagaatcaaagaaagaggataccactgccgtcaccacgacagcacctgctgccgcagtaccccctgcacccaccgccaccgtgcctgctgctgctgcacccgctgctgcctctcctcctcctccacaggcaccatttggctttcctggagatggcatgcagcagccagcatacacacagcatcaaaatatggatcagtttcagccacgaatgatgggaatacaacaggatccaatgcaccatcaggttccacttcctcctaatggacaaatgccaggatttggacttcttcctacacctccatttcctcccatggctcagcctgtgattcctccaactccaccagtgcagcagcctttccaagcttcttttcaggcacaaaatgaaccacttacacagaagccgcatcagcaggaaatggaagtagaacaaccttgtattcaagaggttaagcgacatatgtctgataacagaaagtcaagatctaggtcagcatccaggtcaccaaaaaggaggcgatctagatctggttctagatctcgaaggtctcggcatcgacgttctcgatctcggtccagggatagacgccgacattctccccgatctcgatctcaagaaagacgggatcgagaaaaagagagagaacgtcgacaaaaaggcctccctcaagtgaaaccggaaactgcaagtgtttgcagtactaccctctgggtggggcagctggacaaaagaactactcagcaggatgttgccagtctcttggaagagtttggtccaattgaatcaattaatatgattcctcccaggggttgtgcctatattgttatggttcataggcaagatgcctatcgtgccctgcagaaactgagccgaggaaactataaagtgaaccagaaatccataaagattgcctgggccttaaacaaaggaataaaggcagattataagcagtattgggatgtagaacttggtgttacttatattccatgggacaaagtcaagcctgaggaactggagagtttttgtgaaggaggaatgttggacagtgacacacttaacccagattggaaaggaattcctaagaagcctgaaaatgaagttgctcaaaatggaggtgctgaaacctcacacacagaaccagtatcacccatacctaaaccattacctgtgcctgtccctcctattcctgttcctgcacctataacagtgccacctccacaggtcccaccacatcaaccgggtccacctgtagttggtgctctccagccgcctgctttcacgcctcctctgggaataccgcctccaggctttggtcctggtgttcctcctccccctcctcctccaccatttttgcgcccaggattcaacccaatgcatttaccaccaggttttctgcctcctggacccccacctcctataactccaccagtatccattcctcctcctcacactccaccaataagcatcccaaactctactatcgctggtataaatgaagacactacaaaagacttatctattggaaatcccattccaacagtggtgtctggggctagaggaaacgccgagtctggtgacagcgtgaaaatgtatggctctgccgtgccacctgctgcacccacgaatctgcccacccctcctgtaacccagcctgtttcacttcttggcactcaaggagttgcccctggtcctgtaattggacttcaggcaccatctactggtcttcttggcgcccggcccggtctcatcccactccagcgccctccaggaatgcccccacctcacttacagcggttccctttgatgccgccccgtcccatgccaccgcacatgatgcacagaggcccaccgccaggaccagggggctttgcgatgcctccacctcatggaatgaaaggtcccttcccaccgcatggcccctttgttaggcctggtggaatgccagggctcgggggcccagggccaggcccagggggtcctgaagacagagacggaaggcaacagccgccgcagcagccacagcagcagccacagccgcaggcgccccagcaaccacagcagcagcagcagcagcagccaccaccatcacaacagcctccaccaacacagcagcagccacagcagtttagaaatgataacaggcagcagttcaattcaggtagagaccaagaaaggtttggaagaagatcttttggaaatagggtggaaaatgaccgggaacggtatgggaaccgtaatgatgatagagataatagtaaccgtgacaggagagagtggggaaggaggagccctgaccgggacaggcacagagacttggaagagagaaatagacgctctagtgggcatcgagacagagagagagattctagagatagagagtctcgtagagagaaggaagaagcccgaggaaaggaaaagcctgaggtgacagacagggcaggtggtaacaaaaccgttgaacctcccattagccaagtgggaaatgtagacactgcttcagaacttgagaagggggtgtctgaggctgcagtcctaaagccttctgaagagttacctgctgaggctacctcatccgttgaacccgaaaaggattctggctcagcagcagaggctcctcgttagagactggaatttgtgaaaatgtgacagtgacacttcctggagtgtagagcttgaggtgtacagatgctgtattatatccgctcccgctgtactgcagccccgcgccagctggtggggaactgtaagcaatttgattgcttcccttctatttaaaaatagccacaaaataacaaaaaatactgaaaatatgaataaatattaccctttttgctgtaactttttaaaagttttgactttaaaaagtttacaaatcgtaattagaagtgctctctatttttttttttttttttaatttaagacaaggtaacggtgaaagctcctcaaaacaatagggatgtttttaataaactctattttcgtaacaaactttaatgtgtgctattcttcctacactgcatt

SEQ ID NO: 48 - protein, 1147 aa, Homo sapiens
MDAVNAFNQELFSLMDMKPPISRAKMILITKAAIKAIKLYKHVVQIVEKFIKKCKPEYKVPGLYVIDSIVRQSRHQFGTDKDVFGPRFSKNITATFQYLYLCPSEDKSKIVRVLNLWQKNGVFKIEIIQPLLDMAAGTSNAAPVAENVTNNEGSPPPPVKVSSEPPTQATPNSVPAVPQLPSSDAFAAVAQLFQTTQGQQLQQILQTFQQPPKPQSPALDNAVMAQVQAITAQLKTTPTQPSEQKAAFPPPEQKTAFDKKLLDRFDYDDEPEAVEESKKEDTTAVTTTAPAAAVPPAPTATVPAAAAPAAASPPPPQAPFGFPGDGMQQPAYTQHQNMDQFQPRMMGIQQDPMHHQVPLPPNGQMPGFGLLPTPPFPPMAQPVIPPTPPVQQPFQASFQAQNEPLTQKPHQQEMEVEQPCIQEVKRHMSDNRKSRSRSASRSPKRRRSRSGSRSRRSRHRRSRSRSRDRRRHSPRSRSQERRDREKERERRQKGLPQVKPETASVCSTTLWVGQLDKRTTQQDVASLLEEFGPIESINMIPPRGCAYIVMVHRQDAYRALQKLSRGNYKVNQKSIKIAWALNKGIKADYKQYWDVELGVTYIPWDKVKPEELESFCEGGMLDSDTLNPDWKGIPKKPENEVAQNGGAETSHTEPVSPIPKPLPVPVPPIPVPAPITVPPPQVPPHQPGPPVVGALQPPAFTPPLGIPPPGFGPGVPPPPPPPPFLRPGFNPMHLPPGFLPPGPPPPITPPVSIPPPHTPPISIPNSTIAGINEDTTKDLSIGNPIPTVVSGARGNAESGDSVKMYGSAVPPAAPTNLPTPPVTQPVSLLGTQGVAPGPVIGLQAPSTGLLGARPGLIPLQRPPGMPPPHLQRFPLMPPRPMPPHMMHRGPPPGPGGFAMPPPHGMKGPFPPHGPFVRPGGMPGLGGPGPGPGGPEDRDGRQQPPQQPQQQPQPQAPQQPQQQQQQQPPPSQQPPPTQQQPQQFRNDNRQQFNSGRDQERFGRRSFGNRVENDRERYGNRNDDRDNSNRDRREWGRRSPDRDRHRDLEERNRRSSGHRDRERDSRDRESRREKEEARGKEKPEVTDRAGGNKTVEPPISQVGNVDTASELEKGVSEAAVLKPSEELPAEATSSVEPEKDSGSAAEAPR

SEQ ID NO: 49 - DNA, 107 bp, Homo sapiens
tgaactgccagatgtccaacatcacagtcacatacagagatggccgagtggcacagctggagcaggtatacatccgtggcagcaaaatccgctttctgattttgcct

SEQ ID NO: 50 - DNA, 3466 bp, Homo sapiens
attcgcttgactcacgccttcgccgtagcatctttcgcagcggaccgaagagaagaaaagtaggccagagccgaactctcttcctgccaagatgtctattggtgtgccgattaaagtactgcatgaggccgagggccacattgtgacatgtgagacgaacaccggtgaggtatatcgggggaagctcattgaagcagaggacaacatgaactgccagatgtccaacatcacagtcacatacagagatggccgagtggcacagctggagcaggtatacatccgtggcagcaaaatccgctttctgattttgcctgacatgctgaagaacgcacccatgttaaagagcatgaaaaataaaaaccaaggctcaggggctggccgaggaaaagctgctattctcaaggcccaagtggccgcaagaggaagaggacgtggaatgggacgtggaaacatctttcaaaagcgaagataattttctaagttgaacagaactttgtccttttttctttcaggttatctgagttcattggagtgggtgcttgtgcatatatgctaggtatcttttgccatctttctctttagatcaggggaaatgtttaagctaaataaatctggggggttttttgttctgttttgttttgttttctttgagaaaataaggactttgtgttcatttgaagtttgctttggctaaattttgacaccctgggggatgtcctgggagaatgccagtactttgaaatagcacagctattgatgagattttaagctgctgttcctggccagttgcaggttaagccccagaaaagttcaccttggagaagctccgagaacacacagattgtgtctcattcatcttcagacacaggcacatagtgtggcactttgttcagttaacatttgtggagctgtcatcagctcagctttaacaacacaggtgactctttcccttgataaagtcataggtaattcaggggctgggtgcggcggctcacgcatgtaatcccagcactttgggaggccaaggcgggcggatcacgaggtcaggagttcgagaccagcctggccaatatggtgaaacctcgtgtgtactaaaaataaaaaaattagccgggtgcggtggcatgtacctgtagtcccagctactcgggaggctgaggcagaagattcgcttgaacccaggaggtggacattgcagtgagcagagatcatgccactgtactccagcttgggtgacagagcgagactgcacctcaaaaaaaaaaaagtaattcaggggatcctagtggccagcttccttggctcgtatactggctacaacaagtagttttgtggtgatttgtggaaacagattcttgggagcatatcagagcatctcagcattgattggcacatccatagttgttaatgtaggaagggtgaccagcagctcagcacagtggcttgcttccagcactctgggaggctgaggtagaggattgtttgagaggagttcaaaaccagcccgcgagacatagtgagaccctgtctctacaaaaaattctaaaaattaacttggcatggtggtgcacacctgtagtcctcgctactagggaggctgaggtgggaggatcacttgagcctgggagtatgaggctgcagtgagctatgaccttgccactgtactccagcctgggcaaaagagcaagactttgtctttaaagaaaaataagtagtagtaaagagtataagatacacagggtgaataattgtgacaaaaacacagaaactggaaaagcagcctgaaaaaatcaaatcaccaaaaagaggtcttgccaggtattcattatggtatgagctacagcataagccatcaagaggaaaactgatcaattattggcttttagaatattgctcattgaacagattattcaagtaatgaaagaggaggggaaaaaaatccagcacattagttaacctggcatcaattaatgaggttctaataagctttgtcttatgatactacctggaggttacagagctggtattctgaggaataagcatcagtgagttggtcagatacaatagacgtttaaaatagggcttcaggccaaacatggtgccccacgcctataatgccagcactttgggaggtcgaggcgggaggatcacttgaacctaggagtttgagactagcctgggctgttaagctttgttaaccaagaccgcatctctacaaaaaattgaaaagtagctgggcacagctgatgcctgcagtcccagctatcctggaggttgaggcaggacgaccacatgagcccaggagattaaggctgcagtgagctataattgcaccactgcactccagcctggatgacagtgagaccctgtctcttaaataaaaaacaaatgaaagcagtggttttcaacatcaactaaggatcttattagaaatgaagactgcaagccgcacacctggagtggggcccaggaatctgcattttaaacaattccctggtccccagataagtaattcttaagtattctatcttaagtagacctaaagccgtattttgaccctgtactagtatgttattttagtataatcattactgaattcatcatacttttacagtaaacagtacttactttgaataataacacattacacttaatagtagtgaactgcatcctcgatatcaaaagcgacttttgatgtagttcactctggacccgtacaggaacaccagccttgcagattctccacgcaatggaaactggctataaccctacctagatctgaaaagtgaagggggatcaacctaaaatatgtagctttgtaaacagttttatatcctgcatcttaggggggaaaatcagttgacgcagattgaaaacaagttgttccataaggtttattatgaaaaacagtagccctcctaccctgcctttaccccactttccttgcctcacagtagtctgtccaactcttggctgatttgtttgtatttacctccatgtctcaatatgaacatgttttcatgactattccttgatggttttttgtttgcttgttttaagacggtctcactcttccccaggcgggagtgcaatggcacaatcatggctcactgcagcctcaaccttctcgggctcaggtgattctcccacctcagcctcctgagtagctagaaatactggtgcacaccaccatgcctagctaatttttgtattttttgtagagacagggttttgccatgttgcccaagctggtcttgaactccggggctcaagtgatctgcccgcctcggcctgctgggattataggtgtgagccactgcacccggccaccattatcttttgaatcctctcttcctcctgcccaccatgaatttacttcctctcacccatctccctgatattgtaattctggttagatcatattcagtgtcaaattattaagatgtgattaaactttttaaaaata

SEQ ID NO: 51 - protein, 126 aa, Homo sapiens
MSIGVPIKVLHEAEGHIVTCETNTGEVYRGKLIEAEDNMNCQMSNITVTYRDGRVAQLEQVYIRGSKIRFLILPDMLKNAPMLKSMKNKNQGSGAGRGKAAILKAQVAARGRGRGMGRGNIFQKRR

SEQ ID NO: 52 - DNA, 103 bp, Homo sapiens
tccagtgtcgacctacacactcactgctcttaccagatgatgttgccagagtcagtagccattgtttgctcccccaagttccaggaaactggattctttaaac

SEQ ID NO: 53 - DNA, 6406 bp, Homo sapiens
ggaacctccgggtgtcatccgcggggaaaggtggggaagggtcccgggaacgtggtggggcagggcctccgagcgtggttggactttgaaggggatcggccgccatgctgcatcccctttttggaattgctcaaccaggtggtaaccggcgccgcttcctggccttgggaggtggttcctttcttaacccacaagaacctctcccaagagaacttggtcctgatgtctgaccatggagatgtgagcctcccgcccgaagaccgggtgagggctctctcccagctgggtagtgcggtagaggtgaatgaagacattccaccccgtcggtacttccgctctggagttgagattatccgaatggcatccatttactctgaggaaggcaacattgaacatgccttcatcctctataacaagtatatcacgctctttattgagaaactaccaaaacatcgagattacaaatctgctgtcattcctgaaaagaaagacacagtaaagaaattaaaggagattgcatttcccaaagcagaagagctgaaggcagagctgttaaaacgatataccaaagaatatacagaatataatgaagaaaagaagaaggaagcagaggaattggcccggaacatggccatccagcaagagctggaaaaggaaaaacagagggtagcacaacagaagcagcagcaattggaacaggaacagttccatgccttcgaggagatgatccggaaccaggagctagaaaaagagcgactgaaaattgtacaggagtttgggaaggtagaccctggcctaggtggcccgctagtgcctgacttggagaagccctccttagatgtgttccccaccttaacagtctcatccatacagccttcagactgtcacacaactgtaaggccagctaagccacctgtggtggacaggtccttgaaacctggagcactgagcaactcagaaagtattcccacaatcgatggattgcgccatgtggtggtgcctgggcggctgtgcccacagtttctccagttagccagtgccaacactgcccggggagtggagacatgtggaattctctgtggaaaactgatgaggaatgaatttaccattacccatgttctcatccccaagcaaagtgctgggtctgattactgcaacacagagaacgaagaagaacttttcctcatacaggatcagcagggcctcatcacactgggctggattcatactcaccccacacagaccgcgtttctctccagtgtcgacctacacactcactgctcttaccagatgatgttgccagagtcagtagccattgtttgctcccccaagttccaggaaactggattctttaaactaactgaccatggactagaggagatttcttcctgtcgccagaaaggatttcatccacacagcaaggatccacctctgttctgtagctgcagccacgtgactgttgtggacagagcagtgaccatcacagaccttcgatgagcgtttgagtccaacaccttccaagaacaacaaaaccatatcagtgtactgtagccccttaatttaagctttctagaaagctttggaagtttttgtagatagtagaaaggggggcatcacctgagaaagagctgattttgtatttcaggtttgaaaagaaataactgaacatattttttaggcaagtcagaaagagaacatggtcacccaaaagcaactgtaactcagaaattaagttactcagaaattaagtagctcagaaattaagaaagaatggtataatgaacccccatatacccttccttctggattcaccaattgttaacatttttttcctctcagctatccttctaatttctctctaatttcaatttgtttatatttacctctgggctcaataagggcatctgtgcagaaatttggaagccatttagaaaatcttttggattttcctgtggtttatggcaatatgaatggagcttattactggggtgagggacagcttactccatttgaccagattgtttggctaacacatcccgaagaatgattttgtcaggaattattgttatttaataaatatttcaggatatttttcctctacaataaagtaacaattaacttatgtttttgtgcttcagagtgatccatttgatcaagcattgtataaacaggttaaaaaaaaggtatggttgttttggaaaggtgaaggaaaaatggaatttgagatatactgacactgatggtgtgtcccagttcacttttaattactccttgttttttatctgcctgttgccatcttccagaggtgttgtgaagtcatctctgttcttttggtgctgtctcaaatgggtcaaccattcacttcctccttatgccctccatgcttttggctgaggataatgaagcctttgtttggagtaccaggttacactccaataaatgattacatttcccagccaccccaccctaccaatttcattgtgttggctgttcttttctgactaaggcaatacctaggaaaacgcttgaagcagcaattgttactgcaattttctgtgagctgagcctggtgttctaggtggcctagaaataatggtgtcatttgtgacacctcgagtgagggcaggagagtaaatactttggctaggagaagagtgatttattctttatcagaattctaggtgggggagggagaatctgtgaatgcataaagttttcttcatttttaaattttgtctcagtctttattgcttaggttagtggtccttgaacttgtcccctgaaagagcccagttctctatattctttttcttctcttgggttcttaattccccatatagtggaaattccttctttgctgttttggtatgggtgggtctgggggccagctgggcttggacaagccatttcctgctgcagcccagagcagcctggctgttccaccttgctctaaacagtcctgaaattgcccagtcctctgcttttgggaaatccatccccttcttcccattctttgtctaccacttagcttagggctttcttaccttttatttcgactgtagccgttggcttttaccaagtctctttgtttttagcatttcttcattccagtctgttctgcacactttgatcaggagaagcttctcacattccagccatgttcatgttttctctcttgctcaaaaacctgcaatagcttcccattgctgaaaatctaaatttagcttttagtcagaactttccacttaaagttcttacccctggctatatattcaaatatctagggagcaatttaaaaaatactgatgcctgtgttctaccccccaccaattaaagctgaatctctagggtggagcctcagatgttgtttctgcatttgtctttcaagctgctagaattctcaagtacaaccagggttgacaaccactgcattggtctttgatacctaagaattgtgagctctcttatccgtctctgcccaccaaagacattcagccaggtcaacaacatatcatacgttgcaaccacattgatcacagactgatcaccaaactgctatattttcttttctcttcctctaggcacaagatatcttagtggctagatgggtgcaggaaatcagtctgtagatccctcttcatatctgctgcagcctagccactgcagaggcactctgcataggatggtctaagtgtctctgtcttcatcttacctctgtggaggagacgtggaatcaagccagcccacaagccctgagactggataggccggagagaaagaggagtagccagagcggtcgggaaaagaggaaaggaatactgtgggtaaaagggacaaagaccacgcaacctgaggaaagacattgtattgaaagggtaatgactatttggctaaagggactgactcctgggttcccgaggctcaaagaccaggagacttttccactcttgcaagctgcacaagtaccatacttagtgttctgggctgagaggggagacaaaagcatcgtcaggttgccaaacaatgtcccagttgccctgggaggcacaaacctaccaaagtgccataggccaggtgcagagagaatcagaggagctgatttgcttggggtcagagcagagctgggttttttcagatgatcactttcacatactccttgttaaatgggaccaaaggggaagaagaagaaacccttaagcttttgtaatattgtcttgggtaccagataccataaaaggcagcatgagagaaacattcccttgggccagtgtcatggtggattttcttgcttgagaggcaaggatttcagctttcatttggtaccacagaatttaaaattgtaagtgcctatcccttttgactgttgatggcttctttggggttttagttaccccagttgaaagagaaatttttcatattggggttgagaagaatggaggctattaggagcaaagctttaatgagtgaaagtctggtgaatcctgcaattttgatatgtttccagtggattttgagaacacagttttaggaccagagtagatgttgttccctagaaaatagagtcagctattgatattgtgcctcccatccctcatatctcagtgttttaaccccacctgagtttggagaccagtttgtccaaggatctttcaaacatgtgagcccagagtagaacttctgagtcaaggatcatgtctttttctgaggagctttgcttggggcactggaaatcctgtttagatcaggactattggaatattatcctctccaggggaagtgccaggttgaacatttaaggctttgcttctaggcccagctatacattcaccagcaaatcacttaacttcctaaatttctttaaaatctgtaaaatgggatcagtctaatatgcctacctcaaatgatgacagaatgacatctatatgcatatgaggcctacgttagttgaaagatgctataaagatataagggatttgttacttgtctttcttgaaatgttacagttggggtgcggttgcttctatcttctggacctctgcccattcagcatacagctagaggaatctttgggcagatccacattctttagcactagctaggctttgactccaaagctatctggtctaccttgatgttctgagcaggaaaactgaggacctcaagaaccattccaaatttctactcattctccctaagacccagagcagacccaggacctaaagaaattacatcatctctattttcccttggctccagcccactcttgtttgaacctcccacttttgttgttccaactacttcttgagatgaaggaagggcagaacattggccctcttcactgaagtcttcaccccttaatccagggttcaatttttagttcaccttagcctgtttgagattagaagctgggccttaacttacaggtgtgtccggcatcattcaatcagcctgttagatccagaatccagcactgtgacgctacataaccatgggctctgtccttccagttcctttagtgccttccctcactggtaggttcactctgagggcttccttccttgaactccagtggcaactatagtctgtttcccacaatttgttgtgtgtgttttttgttgttttgcagcgttttcatattgtcttttatgtaagtcatgtttctgaactatcgtataaatttcattagggtaagaatcatgtttgctttatgcactgtgtaacatgccttgcagtcagtataggcacttaaccttattgatcagttgttccttggtgttgaataatgtgttaggtagccaggtggacctgtgtcctagcctggagaagctctatgtcaccttgtaggaagccatctgaatttgactcagcatcatatgctgggcctgtgctgcacttgagctttctttccagccgccaggagggatggttgtcctggccaacagcgaatttaatgggtggtcaaaagaagatgtgcctgcatagaaggctgaaagagggagctggaagtaggaggagacaaggagatagtgacaccagtatcttgtcacagaaatcaaggaaggcaacagtttaaaggaggggagggagatcagtggtgccaactggctcagaagaggtttgctgggttaaatctcaagatgagcccatgagatctggtggttagcagaggcctttcctgacaaccccattttaagcacctcttccccatcactctatctcatcactgttactgtctgtgtagccctgtcatgagctaaaatcatcctgtttgtttattgctagcttatgtgtctaaagtatactccttgagaacagcaactttgtctttttcacctttgtactgagtcccctgacatggaataagatatgaataaatgcacagacttgtccaaaatcatccaattaa

SEQ ID NO: 54 - protein, 424 aa, Homo sapiens
MSDHGDVSLPPEDRVRALSQLGSAVEVNEDIPPRRYFRSGVEIIRMASIYSEEGNIEHAFILYNKYITLFIEKLPKHRDYKSAVIPEKKDTVKKLKEIAFPKAEELKAELLKRYTKEYTEYNEEKKKEAEELARNMAIQQELEKEKQRVAQQKQQQLEQEQFHAFEEMIRNQELEKERLKIVQEFGKVDPGLGGPLVPDLEKPSLDVFPTLTVSSIQPSDCHTTVRPAKPPVVDRSLKPGALSNSESIPTIDGLRHVVVPGRLCPQFLQLASANTARGVETCGILCGKLMRNEFTITHVLIPKQSAGSDYCNTENEEELFLIQDQQGLITLGWIHTHPTQTAFLSSVDLHTHCSYQMMLPESVAIVCSPKFQETGFFKLTDHGLEEISSCRQKGFHPHSKDPPLFCSCSHVTVVDRAVTITDLR

SEQ ID NO: 55 - DNA, 107 bp, Homo sapiens
tcttctccacgttctaccacgcctgcgaccagcccggggaggcggtgctgtgcatcctcagctacgacacgctgcagtactgcgacttcttgggctccggggcggcc

SEQ ID NO: 56 - DNA, 3672 bp, Homo sapiens
agtgcccggggcgacggcggcggggaccggccgggccatgggcgccgggggcagaggcggaggcggcagaggcggaggcggcagaggctgcccgggcggcggcgggggccggcggcgcgggacgcgggccgggtagcgccgggccgagcgcggagccatgggccgggctggcaccgggaccgggggcgaggcggtggccgcggtggtggcggggccgctgctgctgctgctgcttgcccggcccccgcctgcctccgccggctacagcgggaagagcgaggtggggctggtgtccgagcacttctcgcaggccccgcagaggctgtccttctacagctggtacggcagtgccaggctcttccgcttccgcgtgcccccagatgctgtgcttctacgctggctcctgcaggtctcccgggagagcggcgctgcctgcaccgacgcggagatcaccgtgcacttccgttccggcgcccctccggtcatcaacccgctgggcaccagcttcccggacgacaccgcggtacagccctccttccaggtcggggtgccgctgagcaccacaccgagaagcaatgcctccgtcaacgtttcccacccggcccccggggactggttcgtggccgcccacctgcccccctcatcccagaagatcgagttgaagggcttggctcccacctgtgcctacgtcttccagcctgaactgctggtcacgcgggtggtcgagatttccatcatggagccggacgtgccccttcctcagaccctcctctcccatcccagctacctcaaggtctttgtccccgattacacgcgggagcttctgctggagctgcgggactgcgtgtccaatgggagcctgggctgccccgtgcgtctcaccgtgggcccggtcaccctgcctagcaacttccagaaggtgctcacctgcaccggtgccccctggccctgccgcctgctgctgccctcaccgccctgggaccggtggctgcaagtgacagctgagagcctggtggggcccctcgggacagtggctttcagtgctgtagctgccctcacagcttgcaggccacggagcgtgaccatccagccccttctgcagagcagccaaaaccagagcttcaatgcctcctctggtctgctgtccccgagccccgaccaccaggacctgggcaggagtggcagggtggaccgcagccccttctgcctcacaaactacccagtcacgcgggaggacatggacgtggtgtcggtgcacttccagcccctggacagggtctcggtgagggtgtgttcggacacgccctccgtgatgcggctgcgcctgaacaccggcatggacagcgggggttccctcaccatctccctgcgggccaacaagacagagatgcggaacgagaccgtcgtagtggcctgcgtgaatgctgcctcgcccttccttggcttcaatacttcgctcaactgcaccacagccttcttccagggctaccctttgtctctgagcgcctggtctcgcagggccaacctcatcatcccctacccagagacagacaactggtacctctccctgcagctcatgtgccctgagaatgctgaggactgtgagcaggctgtggtccacgtggagaccaccttgtacctggtgccctgtttgaacgattgtggaccctatggccagtgcctcctgctccgcagacacagctacctgtatgccagctgcagctgcaaggcaggctggcgtgggtggagctgcacggacaacagcacagcccagacggtggcccagcagagggcggccacactgctgctcacgctcagcaacctcatgttcctggcccccatcgccgtctcagtgcggcgattcttcctggtggaggcctccgtctacgcctacaccatgttcttctccacgttctaccacgcctgcgaccagcccggggaggcggtgctgtgcatcctcagctacgacacgctgcagtactgcgacttcttgggctccggggcggccatctgggtcaccatcctgtgcatggcacggctcaagacagtcctgaaatacgtgctgtttcttctgggtacactggtcatcgccatgtccttgcagctggaccgcaggggcatgtggaacatgctggggccctgcctctttgccttcgtgatcatggcctccatgtgggcttaccgctgcgggcaccggcgccagtgctaccccacctcgtggcagcgctgggccttctacctcctgcccggcgtctctatggcctctgtgggcatcgccatctacacctccatgatgactagcgacaactactactacacccacagcatctggcacatcctgctggccgggagcgcagccttgctgctgccgccacctgaccagcccgccgagccctgggcctgctcgcagaaattcccctgccactatcagatctgcaagaacgatcgggaggaactgtacgcagtgacgtgacactggcctggggacagctgctgctctgatgacctcttcagccaggagctgtatcgagggggaggcgcctggtccagccctggacagattgatttccagctgaataaattggcctagataccctcttacttcctcctactgaggagagggccacccctccctcacacgcacctctcctcgccagctgcctgctcgctgctgagatccctctgcagatcccagctgctgtctgcagtggcccctggggcctgggcttggttacttggagaccacaggtgcctgtgcgagggtggggctgtgtgctctgctggcctgtgggtggctagagatggggagaaggactccctatggtcctgttccctggcgaggctgtggtgagacccatggcgcccaggagccctgagcccaccactggggccgggagctgtggactccgagacccctgctcctggcccctgtgtggccctgatgccagcctgcctggggcatggaggatccccctctgctgctgtggtcaccatagggacgggagacggaggtttcccccagagctgatgggcactggggatgcaggctcccgccccgcccctccctttttcctggctctggagccttgggtccctgagaagagcttccttggactggggtgctctgctgctctgggggtttggcccagaaggaacccctacccagccctgtccacccaccccagcgttcctgggcccccctctgggagcttcctcttggtcccaggagctgcggtggtgtctgccccctgcactgggctctgtgccctgtgggtgttcaggagactggactgtctctgctcctcatgcaaaccttgtgggggaagcaatgaccaggagcagcacctggcccctccctgaggcctgtgagtgtctcggatccgccctggagaagtgagtggctgagacccgggtggggccctcctacccttggctctgggggcttcccttctgggtcttgtccgggatatggccttcctgaaggtcttacctcccccagccgccctgcacttgaccaccaaagcaatctctaagcttataaaggagaaacatatatatatggggttttttggagtaaaggaaaattctaagatattaagacatatttttatgtagatctgatctatctgtgtttggtgaatttaatattctacattgatttttcaaactaaa

SEQ ID NO: 57 - protein, 771 aa, Homo sapiens
MGRAGTGTGGEAVAAVVAGPLLLLLLARPPPASAGYSGKSEVGLVSEHFSQAPQRLSFYSWYGSARLFRFRVPPDAVLLRWLLQVSRESGAACTDAEITVHFRSGAPPVINPLGTSFPDDTAVQPSFQVGVPLSTTPRSNASVNVSHPAPGDWFVAAHLPPSSQKIELKGLAPTCAYVFQPELLVTRVVEISIMEPDVPLPQTLLSHPSYLKVFVPDYTRELLLELRDCVSNGSLGCPVRLTVGPVTLPSNFQKVLTCTGAPWPCRLLLPSPPWDRWLQVTAESLVGPLGTVAFSAVAALTACRPRSVTIQPLLQSSQNQSFNASSGLLSPSPDHQDLGRSGRVDRSPFCLTNYPVTREDMDVVSVHFQPLDRVSVRVCSDTPSVMRLRLNTGMDSGGSLTISLRANKTEMRNETVVVACVNAASPFLGFNTSLNCTTAFFQGYPLSLSAWSRRANLIIPYPETDNWYLSLQLMCPENAEDCEQAVVHVETTLYLVPCLNDCGPYGQCLLLRRHSYLYASCSCKAGWRGWSCTDNSTAQTVAQQRAATLLLTLSNLMFLAPIAVSVRRFFLVEASVYAYTMFFSTFYHACDQPGEAVLCILSYDTLQYCDFLGSGAAIWVTILCMARLKTVLKYVLFLLGTLVIAMSLQLDRRGMWNMLGPCLFAFVIMASMWAYRCGHRRQCYPTSWQRWAFYLLPGVSMASVGIAIYTSMMTSDNYYYTHSIWHILLAGSAALLLPPPDQPAEPWACSQKFPCHYQICKNDREELYAVT

SEQ ID NO: 58 - DNA, 108 bp, Homo sapiens
cctcagtcatcttgacttcaaatctcaacctgagccatccccagttcttagccagttgagccagcgacaacagcaccagagccaggcagtcactgttcctcctcctgg

SEQ ID NO: 59 - DNA, 4299 bp, Homo sapiens
gtgacgcgaggtcacgtgacgggttgggcagcctgtgccgccgccgccgctttgtaagaggcacattggcagattttctattttgtacatacattattttgtatatactgtatatgatgacttcagtgagcagtgaccattgtcgaggtgctcgggaaaaaccacagatttcagcagcacaatcaacgcaaccacagaaacaagtggtacaggcaacagctgaacagatgcgtctcgctcaagtgatctttgataagaatgattcagattttgaagctaaagttaagcagcttatggaagtgacagggaaaaatcaggatgaatgcatagtggccctacatgattgtaatggagatgtgaacaaagctatcaatatattgctggaagggaattcagacacaacttcatgggagactgtagggtgtaagaaaaagaattttgcaaaagaaaattcagaaaacaaagagaatagagagaagaaaagcgagaaagaatcgagtcgtggacgtggaaacaacaaccggaaaggaagaggcggcaatcgtggcagagaatttagaggtgaagaaaatggaattgattgcaatcaagtggacaaaccttcagatcgtggcaagcgagcccggggtagaggatttggacgtggcagagggagaggggcaggaaggttctcaacccaaggcatggggacatttaatcctgcagactattcagattctacatctacagatgtgtgtgggacaaagctagtagtttgggaagctgctcagaatggtgcagatgagggaactgaactggcatcaaatactcacaacatagctcaggatctgtcaaacaaaagttcttatggactcaaaggggcttggaagaattctgtggaagagtggacaacagaagactggactgaagatctttctgaaacaaaggtcttcactgcctcatctgctccagcagagaatcacatcttacctgggcaaagcattgatctggtagccttgctccagaagcctgttcctcacagtcaagcctcagaagccaactcctttgaaacttcccaacagcagggctttggccaagcccttgtcttcacaaattcgcaacacaacaatcagatggcaccagggactggcagctccactgccgtcaactcctgttctcctcagagcctgtcatccgtccttggctcaggatttggagagcttgcaccaccaaaaatggcaaacatcaccagctcccagattttggaccagttgaaagctccgagtttgggccagtttaccaccaccccaagtacacagcagaatagtacaagtcaccctacaactactacttcttgggacctcaagcccccaacatcccagtcctcagtcctcagtcatcttgacttcaaatctcaacctgagccatccccagttcttagccagttgagccagcgacaacagcaccagagccaggcagtcactgttcctcctcctggtttggagtcctttccttcccaggcaaaacttcgagaatcaacacctggagacagtccctccactgtgaacaagcttttgcagcttcccagcacgaccattgaaaatatctctgtgtctgtccaccagccacagcccaaacacatcaaacttgctaagcggcggatacccccagcttctaagatcccagcttctgcagtggaaatgcctggttcagcagatgtcacaggattaaatgtgcagtttggggctctggaatttgggtcagaaccttctctctctgaatttggatcagctccaagcagtgaaaatagtaatcagattcccatcagcttgtattcgaagtctttaagtgagcctttgaatacatctttatcaatgaccagtgcagtacagaactccacatatacaacttccgtcattacctcctgcagtctgacaagctcatcactgaattctgctagtccagtagcaatgtcttcctcttatgaccagagttctgtgcataacaggatcccataccaaagccctgtgagttcatcagagtcagctccaggaaccatcatgaatggacatggtggtggtcgaagtcagcagacactagacactccaaagacaacaggccctccctctgccctcccgtctgtgagctccctgcccagcaccacctcctgcactgcacttctgccgtccacatcccagcacactggcgacctgactagcagccctctctctcagcttagcagttcgctctccagccaccagagcagcctctctgcacatgcagccctctcctcgagcacgtcacacacacatgccagtgtggagagcgcctcttcccaccagtcctcagccaccttctccacggcagcgacctccgtctcaagttccgcatcctcaggcgtcagcctgtccagtagcatgaacaccgcgaacagcctctgtctgggtgggacccccgcgagtgcatccagcagcagtagcagggccgcgcccttggtgacctcaggcaaagcacccccaaacttacctcagggggtgcctcccctgctgcacaaccagtacctcgtaggtcccggaggactgcttcctgcctacccgatctatggctatgacgagctccagatgctgcagtcacggctgccagtggactactatggaattccctttgctgcacccacagcgcttgccagccgagatgggagcctagctaataatccatatccaggtgatgtcacaaagtttggccgtggggactctgcatcccctgcacccgctaccacaccagctcagccacagcagagccaatcacagacccaccacacagcccagcagcccttcgtgaatcctgcactgccacctggctatagctacactggtcttccctactacacaggcatgcccagtgccttccagtatggccccaccatgtttgtccctccagcctcagccaagcaacatggggtgaacctcagcactcccacacctcccttccagcaggccagtggttatggccagcacggctacagtacaggttatgacgacctgacccaggggacagcagcaggagactactccaaaggtggctatgctggatcatcgcaggcaccaaacaagtctgcaggttctgggcctggcaaaggagtatcagtgtcttcaagcaccactggtctacctgatatgactggttctgtctacaataagacacagacttttgacaagcagggatttcatgcagggacgcctccacctttcagcctgccctcggtcttgggctccactgggcccctggcctcgggagcggcccctggctatgcacccccaccattcctacacatcttgccagcccaccagcagccccactcacagctgctgcaccaccaccttccgcaggatgcacagagtggctcgggtcagcgcagccagcccagctccctgcagcccaagtctcaagcctccaaacctgcctacggcaactctccatactggacaaactaaacccagaagagaggggtgggctggggcaaggcttatcctgggcaggagagaacacacgagcacgtatttgggagcccagtgccctttcctagaattcccgacatgtgtcagccatgcctctgtggggagtctgcctcccagactggctactgtatgtaatgtatttatgtatgtatttgtaaatgtgatagaagtctgggggggagttgggggatggcggcagatgttagccaggtctgccctccccattcaagccccttctccactgtagcaaaataagcacccccaccccatctgccttcaggtcttcttcacagcctgcactgcccagtgggccactaggggcagtctctggaagggctggttcaaggctgtttgggtataggggtcaggtaccaatgaagaatcacgacttgtctcactcctttggaaattgttttctttcctgtgtaattacttcatacctctgtttttgagaaactgttccgtttgtcatctgtcatggtctccttccaccaaatcttcatctgggaatagcagcggtatccctccacccaagtatggccacctgtttgtcttcatatagaacaggggcttctggtctggtcatgtccctagagacttactagagactggctgaccatgaaaaaaaaaaaaataatctgagttattcagccagtcagctcccctttaaaaatctaaggtatctccaagcaacacatctccattctagttgtcttgaaccacgtgggcaactgtttcaggggttttctcttgcccaatccccacctaataaagttctgagagcatgaaaaaaaaaaaaaaa

SEQ ID NO: 60 - protein, 1066 aa, Homo sapiens
MMTSVSSDHCRGAREKPQISAAQSTQPQKQVVQATAEQMRLAQVIFDKNDSDFEAKVKQLMEVTGKNQDECIVALHDCNGDVNKAINILLEGNSDTTSWETVGCKKKNFAKENSENKENREKKSEKESSRGRGNNNRKGRGGNRGREFRGEENGIDCNQVDKPSDRGKRARGRELASNTHNIAQDLSNKSSYGLKGAWKNSVEEWTTEDWTEDLSETKVFTASSAPAENHILPGQSIDLVALLQKPVPHSQASEANSFETSQQQGFGQALVFTNSQHNNQMAPGTGSSTAVNSCSPQSLSSVLGSGFGELAPPKMANITSSQILDQLKAPSLGQFTTTPSTQQNSTSHPTTTTSWDLKPPTSQSSVLSHLDFKSQPEPSPVLSQLSQRQQHQSQAVTVPPPGLESFPSQAKLRESTPGDSPSTVNKLLQLPSTTIENISVSVHQPQPKHIKLAKRRIPPASKIPASAVEMPGSADVTGLNVQFGALEFGSEPSLSEFGSAPSSENSNQIPISLYSKSLSEPLNTSLSMTSAVQNSTYTTSVITSCSLTSSSLNSASPVAMSSSYDQSSVHNRIPYQSPVSSSESAPGTIMNGHGGGRSQQTLDTPKTTGPPSALPSVSSLPSTTSCTALLPSTSQHTGDLTSSPLSQLSSSLSSHQSSLSAHAALSSSTSHTHASVESASSHQSSATFSTAATSVSSSASSGASLSSSMNTANSLCLGGTPASASSSSSRAAPLVTSGKAPPNLPQGVPPLLHNQYLVGPGGLLPAYPIYGYDELQMLQSRLPVDYYGIPFAAPTALASRDGSLANNPYPGDVTKFGRGDSASPAPATTPAQPQQSQSQTHHTAQQPFVNPALPPGYSYTGLPYYTGMPSAFQYGPTMFVPPASAKQHGVNLSTPTPPFQQASGYGQHGYSTGYDDLTQGTAAGDYSKGGYAGSSQAPNKSAGSGPGKGVSVSSSTTGLPDMTGSVYNKTQTFDKQGFHAGTPPPFSLPSVLGSTGPLASGAAPGYAPPPFLHILPAHQQPHSQLLHHHLPQDAQSGSGQRSQPSSLQPKSQASKPAYGNSPYWTN

SEQ ID NO: 61 - DNA, 103 bp, Homo sapiens
atcagcttgcacctggagaatttcaggtgtcaactgacggacgcttgtttagtctgaagccaacatccggacctgtcttaacagtaactctgtttgggaggtt

SEQ ID NO: 62 - DNA, 3853 bp, Homo sapiens
agcactcattggacttcagcatgactactcagttgccagcttacgtggcaattttgcttttctatgtctcaagagccagctgccaggacactttcactgcagctgtttatgagcatgcagcgatattgcccaatgccaccctaacaccagtgtctcgtgaggaggctttggcattaatgaatcggaatctggacattttggaaggagcgatcacatcagcagcagatcagggtgcgcatattattgtgactccagaagatgctatttatggctggaacttcaacagggactctctctacccatatttggaggacatcccagaccctgaagtaaactggatcccctgtaataatcgtaacagatttggccagaccccagtacaagaaagactcagctgcctggccaagaacaactctatctatgttgtggcaaatattggggacaagaagccatgcgataccagtgatcctcagtgtccccctgatggccgttaccaatacaacactgatgtggtatttgattctcaaggaaaactggtggcacgctaccataagcaaaaccttttcatgggtgaaaatcaattcaatgtacccaaggagcctgagattgtgactttcaataccacctttggaagttttggcattttcacatgctttgatatactcttccatgatcctgctgttaccttggtgaaagatttccacgtggacaccatagtattcccaacagcttggatgaatgttttgccacatttgtcagctgttgaattccactcagcttgggctatgggcatgagggtcaatttccttgcatccaacatacattacccctcaaagaaaatgacaggaagtggcatctatgcacccaattcttcaagagcatttcattatgatatgaagacagaagagggaaaactcctcctctcgcaactggattcccacccatcccattctgcagtggtgaactggacttcctatgccagcagtatagaagcgctctcatcaggaaacaaggaatttaaaggcactgtctttttcgatgaattcacttttgtgaagctcacaggagttgcaggaaattatacagtttgtcagaaagatctctgctgtcatttaagctacaaaatgtctgagaacataccaaatgaagtgtacgctctaggggcatttgacggactgcacactgtggaagggcgctattatctacagatttgtaccctgttgaaatgtaaaacgactaatttaaacacttgcggtgactcagctgaaacagcttctaccaggtttgaaatgttctccctcagtggcactttcggaacccagtatgtctttcctgaggtgttgctgagtgaaaatcagcttgcacctggagaatttcaggtgtcaactgacggacgcttgtttagtctgaagccaacatccggacctgtcttaacagtaactctgtttgggaggttgtatgagaaggactgggcatcaaatgcttcatcaggcctcacagcacaagcaagaataataatgctaatagttatagcacctattgtatgctcattaagttggtagaatattgactttttctcttttttatttgggataatttaaaaaatgatggatgagaaaagaaagattggtccgggttaatattatcctctagtataagtgaattactagtttctctttatttagacaaacacacacacaccagataatataaacttaataaattatctgttaatgtagattttatttaaaaaactatatttgaacattggtctttcttggacgtgagctaattatatcaaataagtatcacaaatcttttacgcagaagaaataaaaactacgggtagaaaacataagaactatcataaaatttacttacaaggaggctgctcttgttaccacttttattatattacgtatcacttattcagctctgctgaaaatttccaatgactttgtttgtttgctctttttgttttttacctaaacaatacattttgattctcttgtgggttgataatgtctccccaaaatttacatgttgaagcacctcagaatgtgactgtatttggagacagggtctttaaagaggtaaaataaggtcattaggatagaccctaattcaatatgactgatgatcataaaagaagaggcgagtagggcacaacaggcacaaagggagaccataaggagacacagaggaaggacaactctttacaagctaagaagagagggcctcagaagaaaccaaccctgccaacaccttgatcttggacttccagcctccaaaactatgagaaataaatttctattgtttaagtcacccagtccatggtactttgttaggcagccctggcaaatgaatcaaagacccattcctgttcctctccccaccactactgttttctactgtaatctgaagcttcaacaaaaggcttacctggtaagaatattcagctggtctgggtcctcaagactccaatagacactcttagagaaggattgctgatggattgatagtgaaaccattagatcattgaattcctctggaattagaaaaccagagagtcccattttaagaaattagatatttaatatagcattgtgtgttctattttagtaacagcagaatctcttgacattacacaactcagtgaaacaacatcatttaagccaaaatatctcccaactgactgatagactctgagcactaatatcatagtgctgtgatgatggacaattacatagtaccgataacagccatgcactgtgcaaagcatgcccttctgcacaggagagcaaggcacttgcagtagtgatctatgccagcaaaacatcattttgagacaaacatttttgtggcagatgtttttcctaaaaagtactatatcatccaagaaatatttgagtaaaatcccttgttcttttgggtgacattaactgacatttgctttttttcaagacctaatagaaaataagaaagcccataatgtatttagaaacaggaatcctcagagcaattctctgtattctcatataatttcaatgtaaaacagaaaacatattgatgtgttggtgataggcttgaattattaaaaacttcaaaaacatcctaagtgtttcttttttgctcaacgttgtcaactatagtaggtctcccttgtggtgtaatgaattgcccccaaactattatcttaaaacaacaaacatttattatcttatagcatttctgagggtcaggatctgggactggcttagtggagttgttctggatcagggcctttggaaagttgtagttaacttgtccccagggctgccatcatctcaaggctcgggtggggctggagaaaatctgcttctcagctcactcacggcggttgccaggcctccattctttaggatgctagaaaaactttcataaaatgtcatctggcttctcctagagcaatgatactgagagagaaagcacatgagagaaagagcgagggaacttggatgtaagccacagtctttgaaaacctaatcacagaagtgacatctcttcttccacatgatgttggtcacatggaccaacaatggcacaacgtggacagaatcaaacagagttgagaatatcaggaggtggggcttcatgggggccattttggatgctatcatagtgaatatatgtatttatatttatatctgtatatattgcaatgtaatttaaaaaataggattgttttccttttctttttgctatatgtgatatgtatttcaaaatacactcccaatagttacgtctgaaaagcactacactaaaaaactttctatacattgaataattaaattaaataatctaataatctcta

SEQ ID NO: 63 - protein, 513 aa, Homo sapiens
MTTQLPAYVAILLFYVSRASCQDTFTAAVYEHAAILPNATLTPVSREEALALMNRNLDILEGAITSAADQGAHIIVTPEDAIYGWNFNRDSLYPYLEDIPDPEVNWIPCNNRNRFGQTPVQERLSCLAKNNSIYVVANIGDKKPCDTSDPQCPPDGRYQYNTDVVFDSQGKLVARYHKQNLFMGENQFNVPKEPEIVTFNTTFGSFGIFTCFDILFHDPAVTLVKDFHVDTIVFPTAWMNVLPHLSAVEFHSAWAMGMRVNFLASNIHYPSKKMTGSGIYAPNSSRAFHYDMKTEEGKLLLSQLDSHPSHSAVVNWTSYASSIEALSSGNKEFKGTVFFDEFTFVKLTGVAGNYTVCQKDLCCHLSYKMSENIPNEVYALGAFDGLHTVEGRYYLQICTLLKCKTTNLNTCGDSAETASTRFEMFSLSGTFGTQYVFPEVLLSENQLAPGEFQVSTDGRLFSLKPTSGPVLTVTLFGRLYEKDWASNASSGLTAQARIIMLIVIAPIVCSLSW

SEQ ID NO: 64 - DNA, 102 bp, Homo sapiens
gagaatctgaattatccagaacagaaagttgtgactgttggacagttcaaaattggtctgatccatggacatcaagttattccatggggagatatggccagc

SEQ ID NO: 65 - DNA, 1531 bp, Homo sapiens
gaggagcctgaggaagagggcggcgacggtggtggtgactgagcggagcccggtgacaggatgttggtgttggtattaggagatctgcacatcccacaccggtgcaacagtttgccagctaaattcaaaaaactcctggtgccaggaaaaattcagcacattctctgcacaggaaacctttgcaccaaagagagttatgactatctcaagactctggctggtgatgttcatattgtgagaggagacttcgatgagaatctgaattatccagaacagaaagttgtgactgttggacagttcaaaattggtctgatccatggacatcaagttattccatggggagatatggccagcttagccctgttgcagaggcaatttgatgtggacattcttatctcgggacacacacacaaatttgaagcatttgagcatgaaaataaattctacattaatccaggttctgccactggggcatataatgccttggaaacaaacattattccatcatttgtgttgatggatatccaggcttctacagtggtcacctatgtgtatcagctaattggagatgatgtgaaagtagaacgaatcgaatacaaaaaaccttaaagccaggcctgtcttgatgatttttggttttttttcattgtcctgttgaaatcaagtaattaaacatttaagagccacaaaattgtatcacttttataatattttgcagtaaaatataataccatcttctctgttaatacataattgctccaagcttcctgtaaactataagaatatatttagtttacagtatatggattctatgaaaaaatgtccacaacacagtaattggtcacttgttaagaaaaatttatccttgtaagtatcttcaaagttgatatttggaactttattccaaaagtagtgcatgtggagaaagaatctagactttcttgtatacatttttctcttctccagtaataaacaattacctttcatttatactttgataacctgtatttaatttaaaaaaaaacataaaaatgaggaaccaagtgaaactacggatataaatattaaagtggacgagatgacctttcagagctcttctcttacattgtgtcataatgttggactcagattttatttgctaaataatataccatgccgacattaacagtgattcttcaaactgttgctatttccatttttcaaggtttaataaaagttttaaaaatacaagtttaggggccgggcacagtggctcacaccctaatcccaacactttgggaggctgaggcaggtggatcacctgaggtcaggagttcaagaccagcctggccaacatggtgaaaccctgtctgtactaaaaatacaaaattagccagcatggtgctacatgcctgtattcccagctactcgggaggctgaggcagtagaatcacttgaatcctggagttggaggttgcagtgagccgagatcacaccattgcactccagcctggtcaacaagagcataactccgtctcaaaaaaaaacaaaa

SEQ ID NO: 66 - protein, 182 aa, Homo sapiens [sequence omitted]

SEQ ID NO: 67 - DNA, 103 bp, Homo sapiens
cagatgaaactcctgacaactgcgagatgttcctcaatttcaacggcatgaagctcttcctggactgcctgaaggaattcccagagaagcaggaactgcatag

SEQ ID NO: 68 - DNA, 4102 bp, Homo sapiens
cgtgagccactgcgctcggccagaaggaactggtttgacaggatccttaggacttggagactggacgaggggcccaggaaaatgtaggggccgaggtcgccgcccaatttcccatttggaagctcggttgcctggtggcgcatgccctagatggaggcagtggctctgccaatgatcctgtgagtattcaggaatcactgttgcccctggggatccttgtcctggagtggcccacctgcttgcccccagcatggcgtccgacactcccgagtcgctgatggccctctgtactgacttctgcttgcgcaacctggatggcaccctgggctacctgctggacaaggagaccctgcggctacatccggacatcttcttgcccagcgagatctgtgaccggctcgtcaatgagtatgtggagctggtgaacgctgcctgtaacttcgagccacacgagagcttcttcagcctcttttcggacccccgcagcacccgcctcacgcggatccacctccgtgaggacctggtgcaggaccaggacctggaggccatccgcaagcaggacctggtggagctgtacctgactaactgcgagaagctgtccgccaagagcctgcagacactgaggagcttcagccacaccctggtgtccttgagcctcttcggctgtacaaacattttctatgaggaggagaacccagggggctgtgaagatgagtacctcgtcaaccccacctgccaggtgctggttaaggatttcaccttcgagggcttcagccgcctccgcttcctcaacttgggccgcatgattgattgggtccctgtggagtccctgctgcggccgcttaactccctggctgccttggacctctcaggcattcagacgagcgacgccgccttcctcacccagtggaaagacagcctggtgtccctcgtcctctacaacatggacctgtccgacgaccacatccgggtcatcgtgcagctgcacaagctgcgacacctggacatctcccgagaccgcctctccagctactacaagttcaagctgactcgggaggtgctgagcctctttgtgcagaagctggggaacctaatgtccctggacatctctggccacatgatcctagagaactgcagcatctccaagatggaagaggaagcggggcagaccagcattgagccttccaagagcagcatcatacctttccgggctctgaagaggccgctgcagttcctcgggctctttgagaactctctgtgccgcctcacgcacattccagcctacaaagtaagtggtgacaaaaacgaagagcaggtgctgaatgccatcgaggcctacacggagcaccggcctgagatcacctcgcgggccatcaacttgctttttgacatcgcccgcatcgagcgttgcaaccagctgctgcgggccctgaagctggtcatcacggccctcaagtgccacaaatatgacaggaacattcaagtgacaggcagcgccgctctcttctacctaacaaattccgagtaccgctcagagcagagtgtgaagctgcgccggcaggttatccaggtggtgctgaatggcatggaatcctaccaggaggtgacggtgcagcggaactgctgcctgacgctctgcaacttcagcatccccgaggagctggaattccagtaccgccgggtcaacgagctcctgctcagcatcctcaaccccacgcggcaggacgagtctatccagcggatcgccgtgcacctgtgcaatgccctggtctgccaggtagacaacgaccacaaggaggccgtgggcaagatgggctttgtcgtgaccatgctgaagctgattcagaagaagctgctggacaagacatgtgaccaggtcatggagttctcctggagtgccctgtggaacatcacagatgaaactcctgacaactgcgagatgttcctcaatttcaacggcatgaagctcttcctggactgcctgaaggaattcccagagaagcaggaactgcataggaatatgctaggacttttggggaatgtggcagaagtgaaggagctgaggcctcaactaatgacttcccagttcatcagcgtcttcagcaacctgttggagagcaaggccgatgggatcgaggtttcctacaatgcctgcggcgtcctctcccacatcatgtttgatggacccgaggcctggggcgtctgtgagccccagcgtgaggaggtggaggaacgcatgtgggctgccatccagagctgggacataaactctcggagaaacatcaattacaggtcatttgaaccaattctccgcctccttccccagggaatctctcctgtcagccagcactgggcaacctgggccctgtataacctcgtgtctgtctacccggacaagtactgccctctgctgatcaaagaaggggggatgccccttctgagggacataattaagatggcgaccgcacggcaggagaccaaggaaatggcccgcaaggtgattgagcactgcagtaactttaaagaggagaacatggacacgtctagatagaggcctccgtccccatggccgccaccgctctggaccacaggcggggaggaagcatgctcaagcagcccagcgggcgggccccttccgagggagcctcccacggagtgaagagacatgggggacttttgcacaaccgacgcttttccttaatgttagtgagatatatatatattatatatatatattttttttttggttaggaagtgtgaagttttgtgtgtatgatttctgtgcaaaaacaaaagcaacactcctgagtccttgcagcttccttggccattctcaaacccactcagccttcatcgctgacacacacactcctaccccaaccagactaaatgcctataacgctgtgagtgtccagtccttgtccaggaaactcagatcccggcctggcttcctttcatgagaggagcaggccttggacagcgtatcgagcatcctgacccactgcccctgcctgagaacgccatctcggctcccgggcacagctgatggggtttggggattagaacttaccccactgggtctcccaaaagccttggtgctcccggctgtgggccatctggggcaggaaagtgagccattcctaggctgaggtccaggcagccctgcccctgaagaccctctaggagcagggcacccagtggccctgctgctgtccagccaggcctgcctgaggccacgctgctatggaggctgcctcctagtctcccaccaggtcccaggctgtggaaagccccagcccagggatggtcagaactcaggggcagattccactgccccttctgccaaacacatccagaacctgccctcagccctggaagctagcatcttctggggccaggggcttgcttcctcgctccatagccctcaactgcccaggcgctcccaccagcagaactgagcctgcctcctcctcccagcctgccccgctgcccagaggaccccacgcctctcagaggcagaggtcccatgacagcctttgacccacaacggccacacagccgcctccagaccagcactcggactgccctgcagtggccgcttgggcctccctggcggtcccgccctgccctaggctttaccttggaagcctgagaggcgccggctctcttgctcctccatcgatggacactgcattgcttctcatcggacacttgtggagcgcaggggcctggggagcagcgctaaccctggaggcagcctttgggtgatggctttttcttcccttttcctcccgcgggcctgttttcaggtgttcctagcatttctgcctccaggcaggacggcaggggtgagcagctttgggagagacacctggcctttttctcctggagcctctccctcccggccctgggaagtgggcgcagccctgtgttcccccagcttggcagatgggctgcatgcggcgctcccttccttcccacgctcagcggccccggccagaccctggcagacttcacacctcattgctttaccccctggggcctggggaaatgtctgtactttgggaagtcacagaaatacatttttgtgcaaaatggaaaa

SEQ ID NO: 69 - protein, 766 aa, Homo sapiens
MASDTPESLMALCTDFCLRNLDGTLGYLLDKETLRLHPDIFLPSEICDRLVNEYVELVNAACNFEPHESFFSLFSDPRSTRLTRIHLREDLVQDQDLEAIRKQDLVELYLTNCEKLSAKSLQTLRSFSHTLVSLSLFGCTNIFYEEENPGGCEDEYLVNPTCQVLVKDFTFEGFSRLRFLNLGRMIDWVPVESLLRPLNSLAALDLSGIQTSDAAFLTQWKDSLVSLVLYNMDLSDDHIRVIVQLHKLRHLDISRDRLSSYYKFKLTREVLSLFVQKLGNLMSLDISGHMILENCSISKMEEEAGQTSIEPSKSSIIPFRALKRPLQFLGLFENSLCRLTHIPAYKVSGDKNEEQVLNAIEAYTEHRPEITSRAINLLFDIARIERCNQLLRALKLVITALKCHKYDRNIQVTGSAALFYLTNSEYRSEQSVKLRRQVIQVVLNGMESYQEVTVQRNCCLTLCNFSIPEELEFQYRRVNELLLSILNPTRQDESIQRIAVHLCNALVCQVDNDHKEAVGKMGFVVTMLKLIQKKLLDKTCDQVMEFSWSALWNITDETPDNCEMFLNFNGMKLFLDCLKEFPEKQELHRNMLGLLGNVAEVKELRPQLMTSQFISVFSNLLESKADGIEVSYNACGVLSHIMFDGPEAWGVCEPQREEVEERMWAAIQSWDINSRRNINYRSFEPILRLLPQGISPVSQHWATWALYNLVSVYPDKYCPLLIKEGGMPLLRDIIKMATARQETKEMARKVIEHCSNFKEENMDTSR

SEQ ID NO: 70 - DNA, 104 bp, Homo sapiens
cagggccgagcagaagtagtgagtttgcttctggaccgaaaagccaatgttgaacatagggcaaagacgggtcttacccccttgatggaagcagcttctggagg

SEQ ID NO: 71 - DNA, 8195 bp, Homo sapiens
agtgagaagttagtggcgctgctgggacgggggaaaggagacgcttcttcctcttgctgctcttctcgttcccgagatcagcggcggcggtgaccgcgagtgggtcggcaccgtctccggctccgggtgcgaacaatgctgactgatagcggaggcggcggcacctcctttgaggaggacctggactctgtggctccgcgatccgccccagctggggcctcggagccgcctccgccgggaggggtcggtctggggatccgcaccgtgaggctctttggggaggccgggccagcgtcgggagtcggcagcagcggcggcggcggcagcggcagcggtacgggcggaggggacgcggcgctggatttcaagttggcggctgccgtgctgaggaccgggggtggaggtggtgcctctggcagtgacgaggacgaagtgtccgaggttgaatcatttattttggaccaagaagatctggataacccagtgcttaaaacaacatcagagatattcttatcaagtactgcagaaggagcagacttacgcactgtggatccagagacacaggcacgactagaagcattgctagaagcagcaggaattggcaaattgtcaactgctgatggtaaagcttttgcagatcctgaggtactccggagactgacatcctcagttagttgtgcactggatgaagctgctgctgcactgacacggatgaaagcagaaaacagccacaatgcaggacaagtggacactcgcagtctagcagaagcttgttcagatggggatgttaatgctgttcgtaaattgctagatgaaggcagaagtgtaaatgaacatacagaagaaggagaaagcctgctgtgtttggcttgttcagcagggtattatgaattagcacaagtattgcttgctatgcatgctaatgttgaagatcgagggaataaaggagacataactcccctgatggcagcttccagtggaggttacttagatattgtgaaattattacttcttcatgatgctgatgtcaactcccagtctgcaacaggaaacactgcgctaacttatgcatgtgctggaggatttgttgacattgttaaagtgctccttaatgaaggtgcaaatatagaagatcataatgaaaatggacatactcccttaatggaagcagccagtgcaggtcatgtggaagttgcaagagttcttttagatcatggtgcaggcatcaacactcattctaatgaattcaaagaaagtgctctaacacttgcttgctacaaaggccatttggatatggttcgctttctacttgaagctggtgcagatcaagagcacaaaacagatgagatgcacactgccttaatggaggcctgcatggatggacatgtagaggtggcacgtttgcttttggatagtggtgctcaagtgaacatgcctgcagattcatttgaatctccattgacgctagctgcctgtggaggacatgttgaattggcagctctacttattgaaaggggagcaaatcttgaagaagttaatgatgaaggatacactcccttgatggaagctgcccgggaaggacatgaagaaatggtggcactactcttagcacaaggagcaaatataaatgcccagacagaagaaactcaagaaactgctcttactttggcttgctgtggaggattttctgaagttgcagactttcttattaaggcaggggctgatatagaacttggctgctccacacctctgatggaggcatctcaggagggacacctggaattggttaaatatttgctggcttctggcgctaatgtgcatgctacaacagcaacaggagacacagccttaacctatgcttgtgaaaatggacatacggatgttgcagatgttttacttcaagcaggggctgatttagaacatgaatctgaaggtggaagaacacctttgatgaaagctgcaagagctggtcatttgtgcactgtgcagtttcttattagcaaaggtgccaatgttaacagggctacagccaataatgatcatacagtagtgtcgctggcatgtgcaggaggccacctggcagttgttgagcttctcttggctcatggggctgaccctactcatcgactcaaggatggttcaacaatgctcattgaagctgcaaagggtggccatactaatgtagtttcttatctgttggattatccaaataatgttctgtcagttcccaccacagatgtgtctcagctccctccaccttctcaagatcagtctcaggtgccacgtgtgccaacgcatacacttgccatggttgtacctccccaggaacctgacagaacttcacaggagaactctcctgcccttttaggagtgcaaaaaggtacatccaagcagaagtccagttccctccaggtagcagatcaggacctactgccatcttttcacccataccagcctttggagtgcatagtagaggagactgaaggcaagctgaatgaactgggacaaagaattagtgctattgaaaaagcacagcttaagtcactggagttaattcaaggtgaacctctgaacaaagataagatagaagaacttaaaaagaacagagaagagcaagtccagaagaagaagaaaatattgaaagaactgcagaaagtggaaaggcagttgcagatgaaaacacagcagcaatttaccaaagaatacttggaaaccaaaggtcagaaagacacagtgtctctacaccaacagtgctctcatagaggagtcttcccagaaggggaaggagatggtagtctcccagaggatcacttttcagagttacctcaggttgacacaatcttatttaaagataatgatgttgatgatgagcaacagtctccaccatcggcagaacagattgattttgtcccagtccagcctttatcatctccacagtgtaacttttccagtgacttaggttctaatgggacaaattctcttgaacttcagaaagtatcaggtaatcagcagattgtaggacagcctcagattgctattactggacatgatcaggggctgttagttcaagaaccagatggactaatggttgcaactccagctcagacgcttaccgacactcttgatgacctgatagcagctgtgagtaccagagtgcccactggttccaacagttcttctcagaccacagagtgtcttacacctgaatcctgttcgcagactacaagcaatgtggcttcccaatcgatgcctcctgtgtatccttcagttgacattgatgcacatactgagagcaatcatgacacagcattaacactagcttgtgcaggtggtcatgaagaacttgtatctgtgctcattgcacgggatgccaaaattgaacacagagacaaaaaaggtttcacaccactaatcctggcagcaacagcagggcatgttggagttgttgaaatccttttggataaaggtggagatatagaagcacagtctgaacgaactaaggatactccgctttcattggcatgttctggtggacgtcaggaggtggtagacttgctgctggctcgaggtgcaaataaagaacataggaacgtatctgattatacaccactgagtctagctgcgtctggaggatatgttaatatcattaagattctgcttaatgctggggcagaaattaattcaaggactgggagtaaactaggtatttctcccctgatgttggctgcaatgaatggacatgttcctgcagtaaaattgctgctcgatatgggttcagacattaatgcccaaatagagaccaatcggaacacggctctcaccctggcctgtttccagggccgagcagaagtagtgagtttgcttctggaccgaaaagccaatgttgaacatagggcaaagacgggtcttacccccttgatggaagcagcttctggagggtatgcagaggttggaagagttcttcttgataaaggagcagatgttaatgctccccctgtgccttcctcaagagatactgctttaacaatagcagcagacaaaggtcactacaaattttgtgaactcctgattcataggggagcccacattgatgttcgtaacaaaaagggaaatacgccactttggctggcatccaatggaggtcattttgatgttgtgcagttgctagtgcaagcaggtgctgatgtggatgcagcagataaccggaaaatcacacctcttatgtcagcatttcgcaagggtcatgtaaaagttgttcaatatttggtaaaggaagtaaatcagttcccttctgatatagaatgcatgagatacatagcaacaattacagataaggaactgttgaaaaaatgtcatcaatgtgtcgaaaccattgtgaaggctaaagaccagcaagctgcagaagcaaataagaatgcgagtattcttttaaaggaacttgatctggaaaagtcaagagaagagagcagaaagcaggctcttgctgctaaaagagaaaaaagaaaagaaaagagaaaaaagaaaaaagaggaacagaaaaggaaacaggaagaagatgaagaaaacaaacctaaggagaattcggaactaccagaggatgaagatgaagaggagaatgatgaagatgtggagcaagaagttcccatagaacctcctagtgcaaccaccaccactacgattggaatctctgcaacatctgcaacattcacaaatgtgtttgggaaaaaaagggccaatgtggtgacaactcccagcaccaatcggaaaaataagaagaacaaaacaaaagaaacccctcctacagcacatttaattttaccagaacaacatatgtctttagcccaacaaaaggcagataaaaataaaataaatggagaacctagaggtggtggtgcaggtgggaatagtgattcagataacttggacagcacagactgcaacagtgagagtagcagtggtggtaaaagccaagagttaaattttgtgatggatgtgaattcctctaaatacccctcactgctccttcattcccaagaagaaaagacaagtactgctacttccaaaactcagacacgacttgaaggtgaagtgactcctaattccttgtcaaccagctacaagacagtgtcattgccattaagctctccaaacataaagctgaatctcactagccctaaaaggggtcagaaaagagaagaagggtggaaagaagttgtacgaaggtcaaagaaattgtctgttccagcctcagtggtgtcgaggataatgggaagaggaggatgcaacatcactgcaatacaggatgttactggtgcccatattgatgtggataaacaaaaagataagaatggcgagagaatgatcacaataaggggtggcacagaatcaacaagatatgcagttcaactaatcaatgcactcattcaagatcctgctaaggaactggaagacttgattcctaaaaatcatatcagaacacctgccagcaccaaatcaattcatgctaacttctcatctggagtaggtaccacagcagcttccagtaaaaatgcatttcctttgggtgctccaactcttgtaacttcacaggcaacaacgttatctacgttccagcccgctaataaacttaataagaatgttccaacaaatgtacgttcttctttcccagtttctctacccttagcttatcctcaccctcattttgccctgctggctgctcaaactatgcaacagattcggcatcctcgcttacccatggcccagtttggaggaaccttctcaccttctcctaacacatggggaccattcccagtgagacctgtgaatcctggcaacacaaatagctctccaaagcataataacacaagccgtctacctaaccagaacgggactgttttaccctcagagtctgctggactagctactgccagttgtcctatcactgtctcttctgtagttgctgccagtcagcaactgtgtgtcactaatacccggactccttcatcagtcagaaagcagttgtttgcctgtgtgcctaagacaagtcctccagcaacagtgatttcttctgtgacaagcacttgtagttccctgccttctgtctcctctgcacctatcactagcgggcaagctcccaccacatttctacctgcaagtacttctcaagcacagctttcttcacaaaagatggagtctttctctgctgtgccacccaccaaagagaaagtgtccacacaggaccagcccatggcaaacctatgtaccccatcttcaactgcaaacagttgcagtagctctgccagcaacaccccgggagctccagaaactcacccatccagtagtcccactcctacttccagtaacacacaagaggaggcacagccatccagtgtgtctgatttaagtcctatgtcaatgccttttgcatctaactcagaacctgctccattgactttgacatcacccagaatggttgctgctgataatcaggacaccagtaatttacctcagttagctgtaccagcacctcgagtttctcatcgaatgcagcccagaggttctttttactccatggtaccaaatgcaactattcaccaggatccccagtctatttttgttacgaatccagttactttaacaccacctcaaggcccaccagctgcagtgcagctttcttcagctgtgaacattatgaatggttctcagatgcacataaacccagcaaataagtctttgccacctacatttggcccagccacacttttcaatcacttcagcagtctttttgatagtagtcaggtgccagctaaccagggctggggagatggtccactgtcctcacgagttgctacagatgcctctttcactgttcagtcagcgttcctgggtaactcagtgcttggacacttggaaaacatgcaccctgataactcaaaggcacctggcttcagaccaccttcccagcgagtttctactagtccagttgggttaccatccattgacccatcaggcagctccccatcttcctcttctgctcctctggcaagtttttccggcataccaggaacaagggttttcctgcaagggccagctcctgttgggactcctagtttcaacagacaacatttttctccccatccttggacaagcgcctcaaactcatccacttctgccccaccaacgttgggccaaccaaaaggagtcagtgccagtcaagatcgaaagatacctcccccaattggaacagagagactggcccgaattcggcaaggagggtctgttgcacaagccccggcggggaccagttttgtcgctcccgttggacacagtggaatctggtcatttggtgtcaatgctgtgtcagaaggcttatcaggttggtcgcaatctgtgatggggaaccatccaatgcatcaacaattatcagacccaagcacattctcccaacatcagccaatggagagagatgattctggaatggtagccccctctaacatttttcatcagcctatggcaagtggttttgtggatttttctaaaggtctgccaatttccatgtatggaggcaccataataccctctcatcctcagcttgctgatgttccaggaggccctctgtttaatggacttcacaatccagatcctgcttggaaccctatgataaaagttatccaaaattcaactgaatgcactgatgcccagcagatttggcctggcacgtgggcacctcatattggaaacatgcatctcaaatatgtcaactaagttagaaggtctttactctttagccttgtttaagaaacctatgaccttggaagaaccatggggatttttttttaatgtgcctaagaaattttctctgaggctttagcaatggaaatttgattgcccattgtataagaacaaattgatttcctatccacctgattatgttctctggttagtttagccattttgaacttaagatcatatgaccttagtgcttttggctaaacatacagaatactacttgtatgcagaagagaattagttgattacatgtttcaaccttttagggtgataaatacatgtataattgtttacatacttaaaaggaaaaagttgagtaaatttcttgtcatatagtggctctacgtaatgtagcctgtattaatgtgaaatatttaccagaatattcaataaaaagatgaacagtc

SEQ ID NO: 72 - protein, 2542 aa, Homo sapiens
MLTDSGGGGTSFEEDLDSVAPRSAPAGASEPPPPGGVGLGIRTVRLFGEAGPASGVGSSGGGGSGSGTGGGDAALDFKLAAAVLRTGGGGGASGSDEDEVSEVESFILDQEDLDNPVLKTTSEIFLSSTAEGADLRTVDPETQARLEALLEAAGIGKLSTADGKAFADPEVLRRLTSSVSCALDEAAAALTRMKAENSHNAGQVDTRSLAEACSDGDVNAVRKLLDEGRSVNEHTEEGESLLCLACSAGYYELAQVLLAMHANVEDRGNKGDITPLMAASSGGYLDIVKLLLLHDADVNSQSATGNTALTYACAGGFVDIVKVLLNEGANIEDHNENGHTPLMEAASAGHVEVARVLLDHGAGINTHSNEFKESALTLACYKGHLDMVRFLLEAGADQEHKTDEMHTALMEACMDGHVEVARLLLDSGAQVNMPADSFESPLTLAACGGHVELAALLIERGANLEEVNDEGYTPLMEAAREGHEEMVALLLAQGANINAQTEETQETALTLACCGGFSEVADFLIKAGADIELGCSTPLMEASQEGHLELVKYLLASGANVHATTATGDTALTYACENGHTDVADVLLQAGADLEHESEGGRTPLMKAARAGHLCTVQFLISKGANVNRATANNDHTVVSLACAGGHLAVVELLLAHGADPTHRLKDGSTMLIEAAKGGHTNVVSYLLDYPNNVLSVPTTDVSQLPPPSQDQSQVPRVPTHTLAMVVPPQEPDRTSQENSPALLGVQKGTSKQKSSSLQVADQDLLPSFHPYQPLECIVEETEGKLNELGQRISAIEKAQLKSLELIQGEPLNKDKIEELKKNREEQVQKKKKILKELQKVERQLQMKTQQQFTKEYLETKGQKDTVSLHQQCSHRGVFPEGEGDGSLPEDHFSELPQVDTILFKDNDVDDEQQSPPSAEQIDFVPVQPLSSPQCNFSSDLGSNGTNSLELQKVSGNQQIVGQPQIAITGHDQGLLVQEPDGLMVATPAQTLTDTLDDLIAAVSTRVPTGSNSSSQTTECLTPESCSQTTSNVASQSMPPVYPSVDIDAHTESNHDTALTLACAGGHEELVSVLIARDAKIEHRDKKGFTPLILAATAGHVGVVEILLDKGGDIEAQSERTKDTPLSLACSGGRQEVVDLLLARGANKEHRNVSDYTPLSLAASGGYVNIIKILLNAGAEINSRTGSKLGISPLMLAAMNGHVPAVKLLLDMGSDINAQIETNRNTALTLACFQGRAEVVSLLLDRKANVEHRAKTGLTPLMEAASGGYAEVGRVLLDKGADVNAPPVPSSRDTALTIAADKGHYKFCELLIHRGAHIDVRNKKGNTPLWLASNGGHFDVVQLLVQAGADVDAADNRKITPLMSAFRKGHVKVVQYLVKEVNQFPSDIECMRYIATITDKELLKKCHQCVETIVKAKDQQAAEANKNASILLKELDLEKSREESRKQALAAKREKRKEKRKKKKEEQKRKQEEDEENKPKENSELPEDEDEEENDEDVEQEVPIEPPSATTTTTIGISATSATFTNVFGKKRANVVTTPSTNRKNKKNKTKETPPTAHLILPEQHMSLAQQKADKNKINGEPRGGGAGGNSDSDNLDSTDCNSESSSGGKSQELNFVMDVNSSKYPSLLLHSQEEKTSTATSKTQTRLEGEVTPNSLSTSYKTVSLPLSSPNIKLNLTSPKRGQKREEGWKEVVRRSKKLSVPASVVSRIMGRGGCNITAIQDVTGAHIDVDKQKDKNGERMITIRGGTESTRYAVQLINALIQDPAKELEDLIPKNHIRTPASTKSIHANFSSGVGTTAASSKNAFPLGAPTLVTSQATTLSTFQPANKLNKNVPTNVRSSFPVSLPLAYPHPHFALLAAQTMQQIRHPRLPMAQFGGTFSPSPNTWGPFPVRPVNPGNTNSSPKHNNTSRLPNQNGTVLPSESAGLATASCPITVSSVVAASQQLCVTNTRTPSSVRKQLFACVPKTSPPATVISSVTSTCSSLPSVSSAPITSGQAPTTFLPASTSQAQLSSQKMESFSAVPPTKEKVSTQDQPMANLCTPSSTANSCSSSASNTPGAPETHPSSSPTPTSSNTQEEAQPSSVSDLSPMSMPFASNSEPAPLTLTSPRMVAADNQDTSNLPQLAVPAPRVSHRMQPRGSFYSMVPNATIHQDPQSIFVTNPVTLTPPQGPPAAVQLSSAVNIMNGSQMHINPANKSLPPTFGPATLFNHFSSLFDSSQVPANQGWGDGPLSSRVATDASFTVQSAFLGNSVLGHLENMHPDNSKAPGFRPPSQRVSTSPVGLPSIDPSGSSPSSSSAPLASFSGIPGTRVFLQGPAPVGTPSFNRQHFSPHPWTSASNSSTSAPPTLGQPKGVSASQDRKIPPPIGTERLARIRQGGSVAQAPAGTSFVAPVGHSGIWSFGVNAVSEGLSGWSQSVMGNHPMHQQLSDPSTFSQHQPMERDDSGMVAPSNIFHQPMASGFVDFSKGLPISMYGGTIIPSHPQLADVPGGPLFNGLHNPDPAWNPMIKVIQNSTECTDAQQIWPGTWAPHIGNMHLKYVN

SEQ ID NO: 73 - DNA, 107 bp, Homo sapiens
gtggggacgtatgaggacttccacaccatcgactggctaagggaaaagtcacgggacaccgacagacacaggaagatcaccagcaagagcaaggagtccatatggga

SEQ ID NO: 74 - DNA, 6759 bp, Homo sapiens
gaaatcgacatttgcctctggcaggaaaatgagcttgtcagtttctgcctccattagaccctcaacccaaaggagcaggagatttcggtagcgttttaactttatctcagaatctgaaagcggaaggccaggcaagctgcacacatcaagcgaaacgcctgaggggcggccagcgcgagggtttctggccatcgaccctcacctcccgggacttccagggtcttccccccaccccgcgcacacctccctgcctcgccccgagggcgtcacgtggcagcgtggggcccgcctcctggtgatgtcacggcgctcgcagccgtcgcgctgaagaaaggatgctcgaggatgctgtccaggtgggcggccgcgggcgcgatgcggcactgcaggtgtaattagcatggtcaatgcgggagcgatgagtggctctggaaacctgatggatttcctcgatgagccgttccctgatgtggggacgtatgaggacttccacaccatcgactggctaagggaaaagtcacgggacaccgacagacacaggaagatcaccagcaagagcaaggagtccatatgggagttcatcaagagcctgctggatgcctggtcgggatgggtggtgatgctgctcatcggcctgctggcgggcaccttggctggggtcatcgatctcgccgtggactggatgacggacctgaaggagggggtctgcctgtctgccttctggtatagccatgagcagtgttgctggacttctaacgagaccacttttgaggacagagacaagtgtcccctgtggcagaaatggtcggagctgctggtgaatcagtcagagggtgccagtgcttacattctgaattacttaatgtacatcctatgggcgctgctgtttgcatttttggctgtctccctggtgcgtgtatttgcaccatatgcctgtggctctggcataccagagataaagaccattttgagcggctttatcatcaggggctacttggggaagtggaccctgctaatcaagacagtcacgctggtgctggtagtgtcctccggtctgagccttgggaaggaagggccgctagtgcacgtggcttgttgctgtggcaacttcttcagcagccttttctccaagtacagcaagaatgagggcaagaggcgggaggtgctttcagctgcagcggctgctggagtctctgttgcctttggtgcaccaattggaggcgtgcttttcagtctagaagaggtcagttactactttcccctgaagaccttgtggaggtcatttttcgcagccctggtggcggcctttacgctgagatccatcaatccctttgggaatagccgtctcgttctcttttatgtggaataccacacgccctggtacatggctgaactcttccccttcatcctgcttggggtcttcgggggcttgtggggaaccctcttcatccgctgcaacatcgcctggtgcaggaggcgcaagaccaccaggctggggaagtacccggtgctggaggtcattgtggtgactgccatcactgccatcattgcctaccccaatccctacacacgccagagcaccagcgagctcatttctgagctgttcaatgactgtggagcccttgagtcttcccagctctgtgactacatcaatgaccccaacatgactcggcctgtggatgacattccagaccggccggctggtgtcggtgtttacacggccatgtggcagctggccctggcactgatcttcaaaatcgtcgttaccatatttacctttggcatgaagatcccgtcgggcctcttcatccccagcatggctgtgggcgcgatagcgggcaggatggtgggaattggcgtggagcagctggcctaccatcaccatgactggatcatcttcaggaactggtgcagacccggtgcagactgtgtcacgccagggctgtacgcaatggtgggagctgcggcctgcctcggtggagttaccaggatgacggtgtcattggtggtcatcatgtttgaattaaccgggggtctggagtacatcgtgcccctgatggcggcggctgtgaccagcaagtgggtagctgatgcatttgggaaagaaggcatctacgaggcccacatccacttaaatgggtaccctttccttgacgtgaaggacgagtttactcaccgcacactggccaccgacgtcatgcggccccggcggggagagccgccactgtcggtgctcacccaggacagcatgactgtcgaggacgtggagacgctcatcaaggagaccgactacaacggcttccccgtggtggtctccagagactccgagcgcctcattggatttgcccagaggagggaactgattctcgcaataaagaacgccagacagaggcaggagggcattgtgagcaattccatcatgtacttcacggaggaaccccccgagctgccggccaacagcccacatcccctgaagctgcggcgcatcctgaacctcagcccgtttacagtgacagaccacactccgatggaaacggtggtggatatcttccggaaactggggcttcggcagtgcctggtgacgcggagcgggagacttcttggcatcatcacaaaaaaggatgttctgagacatatggcccagatggcaaaccaggaccccgaatccatcatgtttaattagcaacaaggtggcaattattttcagaaaaacactgactgtgtcatttaaaaagaaataaatgatatgttattatcccaatgaaagatcatgcattggggacagcagaaacaaaagcttttttggaaaggcggggaagaaggatgaaacctttaaaaacaaaaacaaaaacatcaatgagtaggcattttatagctttaaccccgtatgagtttcaagctgtgtttcctaatgagtttgctactgctgtgggggcatgtgggtgggtaaatgatgtaaatgatgtgatctgtacaagtatgtggagcatgaatgctgactcaagaaacttttactccttctgctcaaggctgatgtttgtaacttatgaacacacgtgaagtgttgagtccaaaagacaaaggggcatcggcatgtcagcgtccttatttattggttcttgaagttttgctgctatgttactgaatcatactaaagacatttgcgcttactttgttgaaaaagaaaaagaaattaaatttgaacacagtgaaagctgcaagtatgccagtgggtccgctcacgaccgtcctgtttcttgctcctgttctcagcctgttatctggcttatccatcagtttctgaaccaacatcaggggcacctgccatgatgagtgtgaagaaatcatttctctatgcaagactggcatcctgggactgcacgatgaactattggagcatacagtactgcggtgtgtctcctcccatacaaagggacacatccttattttgagggtatactcacccgatcattgatttgcatccccatggcatttgcttcatttatttattgcttttgcccatgcattcaatattgatcagctcagcacttccatgggccatagccggtatgcccccagcctgccataagcgtgctttcattttcaagtagcatatgcaagagtccaaacaggctacccaatgttactacttatttttcctctcaggtcttatcagatacggctgtggagaggatgaggcatatgcgttgtcagttggaatccctccaaatggattgcaagagaaatactaaattgattctaaatctgttccattatcttctctgtaggatgcaaaacatccagttgtaatgtataagcatgcacttcatactagcaatcacagcacaggaggacagcattaaattttatatagccaatttgggcactgggcatctttgtatttgaacttaacgacacatttactcttttagtcaggatttcggtcttttctgcgggaaggaattaagctatgtattaggtccaccatacgatctgtgtaagtaagattatcccacttgccctttctctttagtctttgtcccttccttttcactaagtgcccctcatccttttcaatctcattgtcactggatagtgctgtatcacttaggtgtgcattcggctgcaaataacagaaaacccagcaaacactgaagggctggataagaaccctgagagggggtactccaggactgtctccataacatcattgggatccccatcccgttgctatttctttttcaccgtttttaccttttgtcctctggcttattgcctcagagttgcaagatggttcctgaactgtcaggtatcatgtctgctttctaagtgggaagaggaagggagaggcaagcaactaggtacaatgtctatcaggaaagcaaagcttccccagagacgctcagcttgtatccattgactggaagtctgtcacgtggctccccctagccgcacactagtgtgggaaggaaaatattgagctaggcacattactctctgaacgaaattcatattatcttattaaggaagagtgttggtcttcaggaggggaagtttgctgtattggatgccatcatcgtgtccttgtcattgcccttccggttttcattcttgctaaacccctgtgaatgttcttctaaccttcctgttccccaccccttttctcagatttgacctagaattcccagcccaaatccataatttcttagctctaatacgaattttcatgttggacaaaaacctagctacaaatgggtttctatggaacttctaattaatgtgcaaaatacatattttctccaggttaagaaattttaagtcagatcatgctgacacaataagaaaatttgtttgtgtaattcattgacctcttccttccaaaataacatcaagtagccacctcagtgtgacaatatccagtcaatagtagagaatttaatccttggtcctataaaagaataaaattcattgtcgtatttatagcacgtaagccttgagtaacaggtcttaatgttagtgttggtgttgtggtttctgcggaacgtttacaagtgaagttggattctcctgggctttaaatccaaaaagtcttaatgaccgcttcatgtagttcccctcttattcccctgtggtctcctcagagccagcgtgtgctgggaaagagtattagtcatagcctggctttatagaatccaggaggtccttttagctgaaacaagtggcttcaaaagggaacatgaaacagtgaaaagatagccaaaggtcagtgaaaccacagcatttctttctaatctggctgaggccatgggggggaatgaggggaaattatgcttccgggccaaggtcaccgagggggaccttgggatttgtgtcctccccagtgcttagagtagagatacctgcaaattcatggcaaacagttggaagagttacttgactgaaacaacccaatcttactttctttcgtaagttgaacctctgatttattgtggggttcaggctctcctcaatagaaggccagagttggacaggtggactaaggtcaaggatgaggagtctgcagtggggactaccacagcaaactgccttccttccgtggagtcctaactcagccatgtggtccactcacccaggggcccgggggctcagacaaaccccatggggaacatgctgccatgctctgtctttcttgtaaacgtagttgggtagggatcccaagggtatttgctctctccaaatgcagaacttccatccactttatctggtgatctgatgaacagcatggggacgtggaggtgaaataagcatctttcagaataaggtttttttttttttcctcttccagaaccaaaggctttagacatttgtagaactttctggattccttctgaatcgggttttaacataaaaaaccatcaacacatcatgggaaaggagctctttcatgatatacatcacatgtttcttgctctcactgaggaaatgtgttgtacaaaagcaccaaataagggcaccctggaagtgacatgtgtgtttcttctaagtcgtttttagtgcatcccctgcgattgcatgatgctcatgtggcttttagggaaaggcagaatgtgctagaagtcgaagtcattcaatattcagtgcttactgttactttgaaccaggtaatctcagttctttattcagtccttcccaaagaccttacaaaggagatgtgtaaactgatagattttgagcctaataagtcacagaaatggaaaattttagagcagtttgtttcacttaggtgagaactgattactttaaattaccaacatgtgcaaattctacttagtattcattattagatgctaagctggaaaagatgagaaacccaaggagaactattgaattaccacataattgtaatattatgctttaattttgtatgggcagtgttctatcagactaagcttctagcctttgaaatgatttacatgaggagagagcctgtatatctgacttgggaaacattaagcagaccctattttcactggcgcggtaataactatttatttgctatcctagaggtgctgggaatgagcctacgtgcgactttgatgagatatattcacatttggtgttggaacgaccacatagcaacgtgttggtttttttttattgtaacactctgtgtaaacgttgacaccttattaaatattaaatgtctgaactctatttttaaaaataaaacaagcacagagtctgcaacaaacatgtaaa

SEQ ID NO: 75 - protein, 760 aa, Homo sapiens
MVNAGAMSGSGNLMDFLDEPFPDVGTYEDFHTIDWLREKSRDTDRHRKITSKSKESIWEFIKSLLDAWSGWVVMLLIGLLAGTLAGVIDLAVDWMTDLKEGVCLSAFWYSHEQCCWTSNETTFEDRDKCPLWQKWSELLVNQSEGASAYILNYLMYILWALLFAFLAVSLVRVFAPYACGSGIPEIKTILSGFIIRGYLGKWTLLIKTVTLVLVVSSGLSLGKEGPLVHVACCCGNFFSSLFSKYSKNEGKRREVLSAAAAAGVSVAFGAPIGGVLFSLEEVSYYFPLKTLWRSFFAALVAAFTLRSINPFGNSRLVLFYVEYHTPWYMAELFPFILLGVFGGLWGTLFIRCNIAWCRRRKTTRLGKYPVLEVIVVTAITAIIAYPNPYTRQSTSELISELFNDCGALESSQLCDYINDPNMTRPVDDIPDRPAGVGVYTAMWQLALALIFKIVVTIFTFGMKIPSGLFIPSMAVGAIAGRMVGIGVEQLAYHHHDWIIFRNWCRPGADCVTPGLYAMVGAAACLGGVTRMTVSLVVIMFELTGGLEYIVPLMAAAVTSKWVADAFGKEGIYEAHIHLNGYPFLDVKDEFTHRTLATDVMRPRRGEPPLSVLTQDSMTVEDVETLIKETDYNGFPVVVSRDSERLIGFAQRRELILAIKNARQRQEGIVSNSIMYFTEEPPELPANSPHPLKLRRILNLSPFTVTDHTPMETVVDIFRKLGLRQCLVTRSGRLLGIITKKDVLRHMAQMANQDPESIMFN

SEQ ID NO: 76 - DNA, 105 bp, Homo sapiens
ggatgtagccaacatcacaatctatgacgaggaagcgatggtggaggctgtggccctctacaaccctgtgagctttgcctttgaggtgactcaggacttcatgat

SEQ ID NO: 77 - DNA, 1514 bp, Homo sapiens
ttcgcgctcccgccgctcctccacgctcgtgccgctccccccccgcgctcccagttgacgctctgggccgccacctccgcggaccctgagcgcaagagccaagccgccagcgctgcgatgtgggccacgctgccgctgctctgcgccggggcctggctcctgggagtccccgtctgcggtgccgccgaactgtgcgtgaactccttagagaagtttcacttcaagtcatggatgtctaagcaccgtaagacctacagtacggaggagtaccaccacaggctgcagacgtttgccagcaactggaggaagataaacgcccacaacaatgggaaccacacatttaaaatggcactgaaccaattttcagacatgagctttgctgaaataaaacacaagtatctctggtcagagcctcagaattgctcagccaccaaaagtaactaccttcgaggtactggtccctacccaccttccgtggactggcggaaaaaaggaaattttgtctcacctgtgaaaaatcagggtgcctgcggcagttgctggactttctccaccactggggccctggagtctgcgatcgccatcgcaaccggaaagatgctgtccttggcggaacagcagctggtggactgcgcccaggacttcaataatcacggctgccaagggggtctccccagccaggctttcgagtatatcctgtacaacaaggggatcatgggtgaagacacctacccctaccagggcaaggatggttattgcaagttccaacctggaaaggccatcggctttgtcaaggatgtagccaacatcacaatctatgacgaggaagcgatggtggaggctgtggccctctacaaccctgtgagctttgcctttgaggtgactcaggacttcatgatgtatagaacgggcatctactccagtacttcctgccataaaactccagataaagtaaaccatgcagtactggctgttgggtatggagaaaaaaatgggatcccttactggatcgtgaaaaactcttggggtccccagtggggaatgaacgggtacttcctcatcgagcgcggaaagaacatgtgtggcctggctgcctgcgcctcctaccccatccctctggtgtgagccgtggcagccgcagcgcagactggcggagaaggagaggaacgggcagcctgggcctgggtggaaatcctgccctggaggaagttgtggggagatccactgggacccccaacattctgccctcacctctgtgcccagcctggaaacctacagacaaggaggagttccaccatgagctcacccgtgtctatgacgcaaagatcaccagccatgtgccttagtgtccttcttaacagactcaaaccacatggaccacgaatattctttctgtccagaagggctactttccacatatagagctccagggactgtcttttctgtattcgctgttcaataaacattgagtgagcacctccccagatggagcatgctggtcctggaaaaaaaaa

SEQ ID NO: 78 - protein, 335 aa, Homo sapiens
MWATLPLLCAGAWLLGVPVCGAAELCVNSLEKFHFKSWMSKHRKTYSTEEYHHRLQTFASNWRKINAHNNGNHTFKMALNQFSDMSFAEIKHKYLWSEPQNCSATKSNYLRGTGPYPPSVDWRKKGNFVSPVKNQGACGSCWTFSTTGALESAIAIATGKMLSLAEQQLVDCAQDFNNHGCQGGLPSQAFEYILYNKGIMGEDTYPYQGKDGYCKFQPGKAIGFVKDVANITIYDEEAMVEAVALYNPVSFAFEVTQDFMMYRTGIYSSTSCHKTPDKVNHAVLAVGYGEKNGIPYWIVKNSWGPQWGMNGYFLIERGKNMCGLAACASYPIPLV

SEQ ID NO: 79 - DNA, 107 bp, Homo sapiens
actcacgccagtatctggaccagatccgccagacaatctttgaaaacctgaagatgctgaaccatgcacctagtgtccagattcatgacgtgcctgcagacctcctg

SEQ ID NO: 80 - DNA, 1622 bp, Homo sapiens
gctggcggcggccgcgggcggcgggcggcggaggtgcggggcctgctcccgccggcaccatggccaagaccgtggcctatttctacgaccccgacgtgggcaacttccactacggagctggacaccctatgaagccccatcgcctggcattgacccatagcctggtcctgcattacggtctctataagaagatgatcgtcttcaagccataccaggcctcccaacatgacatgtgccgcttccactccgaggactacattgacttcctgcagagagtcagccccaccaatatgcaaggcttcaccaagagtcttaatgccttcaacgtaggcgatgactgcccagtgtttcccgggctctttgagttctgctcgcgttacacaggcgcatctctgcaaggagcaacccagctgaacaacaagatctgtgatattgccattaactgggctggtggtctgcaccatgccaagaagtttgaggcctctggcttctgctatgtcaacgacattgtgattggcatcctggagctgctcaagtaccaccctcgggtgctctacattgacattgacatccaccatggtgacggggttcaagaagctttctacctcactgaccgggtcatgacggtgtccttccacaaatacggaaattacttcttccctggcacaggtgacatgtatgaagtcggggcagagagtggccgctactactgtctgaacgtgcccctgcgggatggcattgatgaccagagttacaagcaccttttccagccggttatcaaccaggtagtggacttctaccaacccacgtgcattgtgctccagtgtggagctgactctctgggctgtgatcgattgggctgctttaacctcagcatccgagggcatggggaatgcgttgaatatgtcaagagcttcaatatccctctactcgtgctgggtggtggtggttatactgtccgaaatgttgcccgctgctggacatatgagacatcgctgctggtagaagaggccattagtgaggagcttccctatagtgaatacttcgagtactttgccccagacttcacacttcatccagatgtcagcacccgcatcgagaatcagaactcacgccagtatctggaccagatccgccagacaatctttgaaaacctgaagatgctgaaccatgcacctagtgtccagattcatgacgtgcctgcagacctcctgacctatgacaggactgatgaggctgatgcagaggagaggggtcctgaggagaactatagcaggtctgggagcagggacttcagcctactttcaataggcttgctggggaggtttaaaagggaaaaagtaaatgggaaggtattagtttaattgcctctggcttacctcctttagtctgctacaatttcctcactcttttctttgttatttttaatgacaaaagtaacacgtatttattgcaaaattttaaaacagcaccaaaatatggtgttggcgttcacacaatcccagacctattccacaggagtaaccactgttaatagtttttattgttttggatagacctttttctatagattgcaaatatactattctgtatgtacatataaacaaacacatatacactca

SEQ ID NO: 81 - protein, 434 aa, Homo sapiens
MAKTVAYFYDPDVGNFHYGAGHPMKPHRLALTHSLVLHYGLYKKMIVFKPYQASQHDMCRFHSEDYIDFLQRVSPTNMQGFTKSLNAFNVGDDCPVFPGLFEFCSRYTGASLQGATQLNNKICDIAINWAGGLHHAKKFEASGFCYVNDIVIGILELLKYHPRVLYIDIDIHHGDGVQEAFYLTDRVMTVSFHKYGNYFFPGTGDMYEVGAESGRYYCLNVPLRDGIDDQSYKHLFQPVINQVVDFYQPTCIVLQCGADSLGCDRLGCFNLSIRGHGECVEYVKSFNIPLLVLGGGGYTVRNVARCWTYETSLLVEEAISEELPYSEYFEYFAPDFTLHPDVSTRIENQNSRQYLDQIRQTIFENLKMLNHAPSVQIHDVPADLLTYDRTDEADAEERGPEENYSRSGSRDFSLLSIGLLGRFKREKVNGKVLV

SEQ ID NO: 82 - DNA, 107 bp, Homo sapiens
agcagttctggaaagccgctaagcctggggccaacagcaccacagacgcagtgctactcaacaaactgcaccacgctgcagacttggaaaagaagcagaatgagaca

SEQ ID NO: 83 - DNA, 10098 bp, Homo sapiens
gcagtaaccatgtggatgtgctgctgaagcgtttcctcaagctcgctggggtgggaggagaggaggaggaggaggtggtggtggaggaggaggcagggggtggagagagagaaagcgcacgccgagaggaggtgtgggtgttccgcttccatcctaacggaacgagctccctcttcgcggacatgggattacccagcggctgctaacccctctcctcgccctgctcccccaaaccggcgtggctccccgggcaccaaggagctgactacagaggagcaggatttgcacccctcgctgggcttgctttggcaacagagtgcctgacccaggtcaggattttcaagaaagacatgtctgacaaaatgtctagcttcctacatattggagacatttgttctctgtacgcggagggatcgacaaatggatttattagcaccttgggcctggttgatgatcgttgtgttgtacagccagaaaccggggaccttaacaatccacctaagaaattcagagactgcctctttaagctatgtcccatgaaccgctactctgcccaaaagcagttctggaaagccgctaagcctggggccaacagcaccacagacgcagtgctactcaacaaactgcaccacgctgcagacttggaaaagaagcagaatgagacagaaaacaggaaattgctggggaccgtaatccagtatggcaatgtgatccagctcctgcatttgaaaagtaataaatacctaacagtgaataagaggcttcctgctctgttggagaagaatgccatgagagtcacattggacgaggctggaaatgaagggtcctggttttatattcagccattctacaagctgcgatccattggagacagcgtggtcataggtgacaaggtggttctgaaccccgtcaatgctggtcagcccctacatgctagcagccatcaactggtagataacccaggctgcaatgaggtcaattccgtcaactgcaatacaagctggaaaatagtccttttcatgaaatggagtgataacaaagacgacatattaaaggggggtgacgtggtgaggctgtttcatgctgagcaggagaagtttctcacctgtgacgaacacaggaagaagcagcacgtcttcctgagaaccacgggccggcagtcggccacatctgccaccagttcaaaagccctgtgggaggtggaggtggtccagcatgacccatgtcggggcggagcagggtattggaacagccttttccgtttcaagcatctggccacggggcattacttggcagcagaggtagaccctgactttgaggaagaatgcctggagtttcagccctcagtggaccctgatcaggacgcctctcgaagtaggttgcggaatgcccaagaaaagatggtatactccctggtctctgtgcctgaaggcaatgacatctcctccattttcgagctagatcccaccactctgcgtggaggtgacagccttgtcccaaggaactcttatgttcggctcagacacctatgtactaatacctgggttcacagcacaaatattcctattgacaaggaagaagaaaagcccgtgatgctgaaaattggcacctctcctgtgaaggaggataaggaagcatttgccatagttccggtttctcctgctgaagttcgggacctggactttgccaatgatgccagcaaggtgctgggctccattgctgggaagctagagaagggcaccatcacccagaatgaaaggaggtctgtaaccaagctgctagaagatttggtttacttcgtcactggtggaactaattctggtcaagatgttctcgaagttgtcttctccaagcccaacagagaacggcagaaactgatgagagaacagaatattctcaagcagatcttcaagttgttacaagccccattcacagactgcggtgatggcccaatgcttcggctggaagagctcggggaccagcggcacgctcctttcagacacatctgccggctctgctacagggtgctgagacactcgcagcaagactacaggaagaaccaggagtatatagccaagcagtttggcttcatgcagaagcagattggctatgatgtgttggctgaagacactatcactgccctgctccacaataatcggaaactcctggaaaaacacattaccgcggcagagattgacacatttgtcagcctggtgcgaaagaacagggagcccagattcttagattacctctccgacctctgtgtctccatgaacaaatcaattccagtgacccaggaactgatatgtaaagctgtgctgaaccccaccaacgctgacatcctgattgagaccaagttggttctttctcgttttgaatttgaaggtgtctcttccactggagagaatgctctggaggcaggagaagacgaggaagaggtgtggctgttttggagggacagcaacaaagagattcgcagcaagagtgtgagggaattggctcaggatgctaaagaagggcagaaggaggaccgagacgttctcagctactacagatatcagctgaacctctttgcgaggatgtgtctggaccgccaatacctggccatcaacgaaatctcaggccagctggatgtcgatctcattctccgctgcatgtctgacgagaacctgccctatgacctcagggcgtccttctgccgcctcatgcttcacatgcatgtggaccgagatccccaggaacaagtcacccccgtgaaatatgcccgcctctggtcggagattccctcggagatcgccattgacgactatgatagtagtggagcttccaaagatgaaattaaggagagatttgctcagaccatggagtttgtggaggagtatttaagagatgtggtttgtcagaggttccctttctctgataaagagaagaataagcttacgtttgaggttgtaaatttagctaggaatctcatatactttggtttctacaacttctctgaccttctacgattaactaagatccttctggccatattggactgtgtacatgtgacaacaatcttccccattagcaagatggcgaaaggagaagagaataaaggcagtaacgtgatgagatctattcatggcgtgggagagctgatgacccaggtggtgctccggggaggaggctttttgcccatgactcccatggctgctgcccctgaaggcaatgtgaagcaggcagagcctgagaaggaggacatcatggtcatggacaccaagctgaagatcattgagatactccagtttattttgaatgtgaggttggattataggatctcctgcctcctgtgtatatttaagcgagagtttgatgaaagcaattcccagacttcagaaacatcctccggaaacagcagccaagaagggccaagtaatgtaccaggtgctcttgactttgaacacattgaagaacaagcagaaggcatctttggaggaagtgaggagaacaccccactggacttggatgaccacggcggcagaacctttctccgtgtcctgctccacttgacgatgcatgactacccacccctggtgtcaggggccctgcagctcctcttccggcacttcagccagaggcaggaggtgctccaggccttcaaacaggttcaactgctggttaccagccaagatgtggacaactacaaacagatcaaacaagacttggatcaactgaggtccatcgtggaaaagtcagagctttgggtgtacaaagggcagggccccgatgagactatggatggtgcatctggagaaaatgaacataagaaaacggaggagggaaataacaagccacaaaagcatgaaagcaccagcagctacaactacagagtggtcaaagagattttgattcggcttagcaaactctgtgttcaagagagtgcctcagtgagaaagagcaggaagcagcaacagcgtctgctccggaacatgggcgcgcacgccgtggtgctggagctgctgcagattccctatgagaaggccgaagataccaagatgcaagagataatgaggttggctcatgaatttttgcagaatttctgcgcaggcaaccagcagaatcaagctttgctacataaacacataaacctgtttctcaacccagggatcctggaggcagtaaccatgcagcacatcttcatgaacaatttccagctttgcagtgagatcaacgagagagttgttcagcacttcgttcactgcatagagactcacggtcggaatgtccagtatataaagttcttacagacaattgtcaaggcagaagggaaatttattaaaaaatgccaagacatggttatggccgagctggtcaattcgggagaggatgtcctcgtgttctacaacgacagagcctctttccagactctgatccagatgatgcggtcagaacgggatcggatggatgagaacagccctctcatgtaccacatccacttggtcgagctcctggctgtgtgcacggagggtaagaatgtctacacagagatcaagtgcaactccctgctcccgctggatgacatcgttcgcgtggtgacccacgaggactgcatccctgaggttaaaattgcatacattaacttcctgaatcactgctatgtggatacagaggtggaaatgaaggagatttataccagcaatcacatgtggaaattgtttgagaatttccttgtagacatctgcagggcctgtaacaacactagtgacaggaaacatgcagactcgattttggagaagtatgtcaccgaaatcgtcatgagtattgttactactttcttcagctctcccttctcagaccagagtacgactttgcagactcgccagcctgtctttgtgcaactgctgcaaggcgtgttcagggtttaccactgcaactggttaatgccaagccaaaaagcctccgtggagagctgtattcgggtgctgtctgatgtagccaagagccgggccattgccattcccgtggacctggacagccaagtcaacaacctctttctcaagtcccacagcattgtgcagaaaacagccatgaactggcggctctcagcccgcaatgccgcacgcagggactctgttctggcagcttccagagactaccggaatatcattgagagattgcaggacatcgtctccgcgctggaggaccgtctcaggcccctggtgcaggcagagttatctgtgctcgtggatgttctccacagacccgagctgcttttcccagagaacacagacgccagaaggaaatgtgaaagtggcggtttcatttgcaagttaataaagcatacaaaacagctgctagaagaaaatgaagagaagctctgcattaaggtcctacagaccctgagggaaatgatgaccaaagatagaggctatggagaaaagggtgaggcgctcaggcaagttctggtcaaccgttactatggaaacgtcagaccttcgggacgaagagagagccttaccagctttggcaatggcccactgtcagcaggaggacccggcaagcccgggggaggagggggaggttccggatccagctctatgagcaggggtgagatgagtctggccgaggttcagtgtcaccttgacaaggagggggcttccaatctagttatcgacctcatcatgaacgcatccagtgaccgagtgttccatgaaagcattctcctggccattgcccttctggaaggaggcaacaccaccatccagcactcctttttctgtcgcttgacagaagataagaagtcagagaaattctttaaggtgttttatgaccggatgaaggtggcccagcaagaaatcaaagcaacagtgacagtgaacaccagtgacttgggaaataaaaagaaagacgatgaggtagacagggatgccccatcacggaaaaaagctaaagagcccacaacacagataacagaagaggtccgggatcagctcctggaggcctccgctgccaccaggaaagccttcaccactttcaggagggaggctgatcccgacgaccactaccagcctggagagggcacccaggccactgccgacaaggccaaggacgacctggagatgagcgcggtcatcaccatcatgcagcccatcctccgcttccttcagctcctgtgtgaaaaccacaaccgagacctgcagaacttcctccgttgccaaaataacaagaccaactacaatttggtatgtgagaccctgcagtttctggactgtatttgtggaagcacaactggaggccttggtcttctgggcttgtatataaatgaaaagaatgtagcgcttatcaaccaaaccctggaaagtctgaccgaatactgtcaaggaccttgccatgagaaccagaactgcatagccacccatgaatccaatggcattgacatcatcacagccctgatcctcaatgatatcaatcctttgggaaagaagaggatggaccttgtgttagaactgaagaacaatgcctcgaagttgctcctggccatcatggaaagcaggcacgacagtgaaaacgcagagaggatactttataacatgaggcccaaggaactggtggaagtgatcaagaaagcctacatgcaaggtgaagtggaatttgaggatggagaaaacggtgaggatggggcggcgtcccccaggaacgtggggcacaacatctacatattagcccatcagttggctcggcataacaaagaacttcagagcatgctgaaacctggtggccaagtggacggagatgaagccctggagttttatgccaagcacacggcgcagatagagattgtcagattagaccgaacaatggaacagatagtctttcccgtgcccagcatatgtgaattcctaaccaaggagtcaaaactacgaatttactatactacagagagagacgaacaaggcagcaaaatcaatgatttctttctgcggtctgaagacctcttcaatgaaatgaattggcagaagaaactgagagcccagcccgtgttgtactggtgtgcccgcaacatgtctttctggagcagcatttcgtttaacctggccgtcctgatgaacctgctggtggcgtttttctacccgtttaagggagtccgaggaggaaccctggagccccactggtcgggactcctgtggacagccatgctcatctctctggccatcgtcattgccctccccaagccccatggcatccgggccttaattgcctccacaattctacgactgatattttcagtcgggttacaacccacgttgtttcttctgggcgctttcaatgtatgcaataaaatcatctttctaatgagctttgtgggcaactgtgggacattcacaagaggctaccgagccatggttctggatgttgagttcctctatcatttgttgtatctggtgatctgtgccatggggctctttgtccatgaattcttctacagtctgctgctttttgatttagtgtacagagaagagactttgcttaatgtcattaaaagtgtcactcgcaatggacggtccatcatcctgacagcagttctggctctgatcctcgtttacctgttctcaatagtgggctatcttttcttcaaggatgactttatcttggaagtagataggctgcccaatgaaacagctgttccagaaaccggcgagagtttggcaagcgagttcctgttctccgatgtgtgtagggtggagagtggggagaactgctcctctcctgcacccagagaagagctggtccctgcagaagagacggaacaggataaagagcacacatgtgagacgctgctgatgtgcattgtcactgtgctgagtcacgggctgcggagcgggggtggagtaggagatgtactcaggaagccgtccaaagaggaacccctgtttgctgctagagttatttatgacctcttgttcttcttcatggtcatcatcattgttcttaacctgatttttggggttatcattgacacttttgctgacctgaggagtgagaagcagaagaaggaagagatcttgaagaccacgtgctttatctgtggcttggaaagagacaagtttgacaacaagactgtcacctttgaagagcacatcaaggaagaacacaacatgtggcactatctgtgcttcatcgtcctggtgaaagtaaaggactccaccgaatatactgggcctgagagttacgtggcagaaatgatcaaggaaagaaaccttgactggttccccaggatgagagccatgtcattggtcagcagtgattctgaaggagaacagaatgagctgagaaacctgcaggagaagctggagtccaccatgaaacttgtcacgaacctttctggccagctgtcggaattaaaggatcagatgacagaacaaaggaagcagaaacaaagaattggtcttctaggacatcctcctcacatgaatgtcaacccacaacaaccagcataagcaaatgaaagaaaggaattgtatttaccttttataattattattagtgtgggtatggctaatgagttctgattcacccacgaaggttacatttatgctgaatacatttgtaaatactcagttttatactgtatgtatatgattgctactctaaaggtttggatatatgtattgtaattagaattgttggcatgatgacatttcatttgtgccaaaaatattaaaaatgccttttttggaaggactaacagaaagcacctgatttgcacttgaaccagattatagatttaaaagtatatgacatgtattttgtatttaaaactagaatagccagtatttatgttttttataaaactgtgcaatacgaattatgcaatcacaatacatttgtagctcccgagtgtcctaaagggagtgcacttctttgaagctggtgtgttaatactatgtaataaatggttaactttcaaatgatgctgctgccaaaattatattaatagtgagtttcaggcccctgggcattttgtaccatgtaattatcctctggtgatgctgtttctcgttagtggcagtagtgcctccgtctcctagtgataatgctccaagtctatgaactgttaaatcagcattcattttaagaaaagcaactttagtttcaaagatacttttaagcttctaaattgatcatttaaactatttctttaaataagagagccaaattagaggctcatactttagcttgtgaagaagataatgaattttttaaagggaactttctatgcaatgttcaggataaatgcatactgctggccaatcagtgtcatctcctgggtaaattttgatgtcgcattataaagacatgcataattgatggtttctagattatctagtccaaacaatagagtttattttttcttcatctgaaccaacatgctacagtagctaagaagtattaaaactatatacatccatataaagatgaaatatgaactatctcattagaagtcatagttgaccacagacatgttattcttctgaaagagccacattttggttttatttcttgtcacatgatttcttttcttgatggatgaaaaatatgaaaggaaacttttatatctgttgcctagttttgtacatggatctcattttacaagagaatctctctgcaaaaaaaaaaaaaacagtttaaaaatgcattgaaagcagagttctgaaatgagtaaagtttgtaaatgcatatataaaaatatttaataaatgatgcagaatatacagtgactggttggtggctttcatttggcatttgtgacttaactgctattccatttatgtactttctttaggatcagtttgaagtacagtcggtttgattaccaggttaattcagaaaatgtttacctgattatttaaaaaaacacttgctgttgttatgacagctctgaggagaattattagaacaaacattggggagtatttagtacaacattcattcattcttctggattagtgactgccagccaggctgtcgggagcgccctactaaatctcctgtctcttctgcttttactgggggatctttaatttgctgtgtgccatgtggaagtatcgggaa

SEQ ID NO: 84 - protein, 2710 aa, Homo sapiens
MSDKMSSFLHIGDICSLYAEGSTNGFISTLGLVDDRCVVQPETGDLNNPPKKFRDCLFKLCPMNRYSAQKQFWKAAKPGANSTTDAVLLNKLHHAADLEKKQNETENRKLLGTVIQYGNVIQLLHLKSNKYLTVNKRLPALLEKNAMRVTLDEAGNEGSWFYIQPFYKLRSIGDSVVIGDKVVLNPVNAGQPLHASSHQLVDNPGCNEVNSVNCNTSWKIVLFMKWSDNKDDILKGGDVVRLFHAEQEKFLTCDEHRKKQHVFLRTTGRQSATSATSSKALWEVEVVQHDPCRGGAGYWNSLFRFKHLATGHYLAAEVDPDFEEECLEFQPSVDPDQDASRSRLRNAQEKMVYSLVSVPEGNDISSIFELDPTTLRGGDSLVPRNSYVRLRHLCTNTWVHSTNIPIDKEEEKPVMLKIGTSPVKEDKEAFAIVPVSPAEVRDLDFANDASKVLGSIAGKLEKGTITQNERRSVTKLLEDLVYFVTGGTNSGQDVLEVVFSKPNRERQKLMREQNILKQIFKLLQAPFTDCGDGPMLRLEELGDQRHAPFRHICRLCYRVLRHSQQDYRKNQEYIAKQFGFMQKQIGYDVLAEDTITALLHNNRKLLEKHITAAEIDTFVSLVRKNREPRFLDYLSDLCVSMNKSIPVTQELICKAVLNPTNADILIETKLVLSRFEFEGVSSTGENALEAGEDEEEVWLFWRDSNKEIRSKSVRELAQDAKEGQKEDRDVLSYYRYQLNLFARMCLDRQYLAINEISGQLDVDLILRCMSDENLPYDLRASFCRLMLHMHVDRDPQEQVTPVKYARLWSEIPSEIAIDDYDSSGASKDEIKERFAQTMEFVEEYLRDVVCQRFPFSDKEKNKLTFEVVNLARNLIYFGFYNFSDLLRLTKILLAILDCVHVTTIFPISKMAKGEENKGSNVMRSIHGVGELMTQVVLRGGGFLPMTPMAAAPEGNVKQAEPEKEDIMVMDTKLKIIEILQFILNVRLDYRISCLLCIFKREFDESNSQTSETSSGNSSQEGPSNVPGALDFEHIEEQAEGIFGGSEENTPLDLDDHGGRTFLRVLLHLTMHDYPPLVSGALQLLFRHFSQRQEVLQAFKQVQLLVTSQDVDNYKQIKQDLDQLRSIVEKSELWVYKGQGPDETMDGASGENEHKKTEEGNNKPQKHESTSSYNYRVVKEILIRLSKLCVQESASVRKSRKQQQRLLRNMGAHAVVLELLQIPYEKAEDTKMQEIMRLAHEFLQNFCAGNQQNQALLHKHINLFLNPGILEAVTMQHIFMNNFQLCSEINERVVQHFVHCIETHGRNVQYIKFLQTIVKAEGKFIKKCQDMVMAELVNSGEDVLVFYNDRASFQTLIQMMRSERDRMDENSPLMYHIHLVELLAVCTEGKNVYTEIKCNSLLPLDDIVRVVTHEDCIPEVKIAYINFLNHCYVDTEVEMKEIYTSNHMWKLFENFLVDICRACNNTSDRKHADSILEKYVTEIVMSIVTTFFSSPFSDQSTTLQTRQPVFVQLLQGVFRVYHCNWLMPSQKASVESCIRVLSDVAKSRAIAIPVDLDSQVNNLFLKSHSIVQKTAMNWRLSARNAARRDSVLAASRDYRNIIERLQDIVSALEDRLRPLVQAELSVLVDVLHRPELLFPENTDARRKCESGGFICKLIKHTKQLLEENEEKLCIKVLQTLREMMTKDRGYGEKGEALRQVLVNRYYGNVRPSGRRESLTSFGNGPLSAGGPGKPGGGGGGSGSSSMSRGEMSLAEVQCHLDKEGASNLVIDLIMNASSDRVFHESILLAIALLEGGNTTIQHSFFCRLTEDKKSEKFFKVFYDRMKVAQQEIKATVTVNTSDLGNKKKDDEVDRDAPSRKKAKEPTTQITEEVRDQLLEASAATRKAFTTFRREADPDDHYQPGEGTQATADKAKDDLEMSAVITIMQPILRFLQLLCENHNRDLQNFLRCQNNKTNYNLVCETLQFLDCICGSTTGGLGLLGLYINEKNVALINQTLESLTEYCQGPCHENQNCIATHESNGIDIITALILNDINPLGKKRMDLVLELKNNASKLLLAIMESRHDSENAERILYNMRPKELVEVIKKAYMQGEVEFEDGENGEDGAASPRNVGHNIYILAHQLARHNKELQSMLKPGGQVDGDEALEFYAKHTAQIEIVRLDRTMEQIVFPVPSICEFLTKESKLRIYYTTERDEQGSKINDFFLRSEDLFNEMNWQKKLRAQPVLYWCARNMSFWSSISFNLAVLMNLLVAFFYPFKGVRGGTLEPHWSGLLWTAMLISLAIVIALPKPHGIRALIASTILRLIFSVGLQPTLFLLGAFNVCNKIIFLMSFVGNCGTFTRGYRAMVLDVEFLYHLLYLVICAMGLFVHEFFYSLLLFDLVYREETLLNVIKSVTRNGRSIILTAVLALILVYLFSIVGYLFFKDDFILEVDRLPNETAVPETGESLASEFLFSDVCRVESGENCSSPAPREELVPAEETEQDKEHTCETLLMCIVTVLSHGLRSGGGVGDVLRKPSKEEPLFAARVIYDLLFFFMVIIIVLNLIFGVIIDTFADLRSEKQKKEEILKTTCFICGLERDKFDNKTVTFEEHIKEEHNMWHYLCFIVLVKVKDSTEYTGPESYVAEMIKERNLDWFPRMRAMSLVSSDSEGEQNELRNLQEKLESTMKLVTNLSGQLSELKDQMTEQRKQKQRIGLLGHPPHMNVNPQQPA

SEQ ID NO: 85 - DNA, 103 bp, Homo sapiens
aagtctgactctgggactgcctcacaccttcaggattacgcagtagagaatctcatccgcatgggcatggccggcttgatcctggtggtccttgggattctga

SEQ ID NO: 86 - DNA, 1390 bp, Homo sapiens
gcatttctcctctgtgctcattgccacatgcagctcagcctgggctacacagccaggtgtcagatgtgtctctgctgatctgagtctgcctgtggcatggacctgcatcttccctgaagcatctccagggctgaaaaatcactgaccatggcaccatggtctcatccatctgcacagctgcagccagtgggaggagacgccgtgagccctgccctcatggttctgctctgcctcgggctgagtctgggccccaggacccacgtgcaggcagggaacctctccaaagccaccctctgggctgagccaggctctgtgatcagccgggggaactctgtgaccatccggtgtcaggggaccctggaggcccaggaataccgtctggttaaagagggaagcccagaaccctgggacacacagaacccactggagcccaagaacaaggccagattctccatcccatccatgacagagcaccatgcagggagataccgctgttactactacagccctgcaggctggtcagagcccagcgaccccctggagctggtggtgacaggattctacaacaaacccaccctctcagccctgcccagtcctgtggtgacctcaggagagaacgtgaccctccagtgtggctcacggctgagattcgacaggttcattctgactgaggaaggagaccacaagctctcctggaccttggactcacagctgacccccagtgggcagttccaggccctgttccctgtgggccctgtgacccccagccacaggtggatgctcagatgctatggctctcgcaggcatatcctgcaggtatggtcagaacccagtgacctcctggagattccggtctcaggagcagctgataacctcagtccgtcacaaaacaagtctgactctgggactgcctcacaccttcaggattacgcagtagagaatctcatccgcatgggcatggccggcttgatcctggtggtccttgggattctgatatttcaggattggcacagccagagaagcccccaagctgcagctggaaggtgaacagaagagagaacaatgcaccattgaatgctggagccttggaagcgaatctgatggtcctaggaggttcgggaagaccatctgaggcctatgccatctggactgtctgctggcaatttctttttttctttcttttcttttctttcttttttttttttttttttttttttgagatggagtcttgctctgtcaccaggctggaatgcagtggcgcaatctgggctcactgcaacctccgcctctcgggttcaagtgattctcctgcctcagcctctggcaatttctagagggaggaatgggtgtttgagtgcagagacactggtctggggtgatccatggagga

SEQ ID NO: 87 - protein, 299 aa, Homo sapiens
MAPWSHPSAQLQPVGGDAVSPALMVLLCLGLSLGPRTHVQAGNLSKATLWAEPGSVISRGNSVTIRCQGTLEAQEYRLVKEGSPEPWDTQNPLEPKNKARFSIPSMTEHHAGRYRCYYYSPAGWSEPSDPLELVVTGFYNKPTLSALPSPVVTSGENVTLQCGSRLRFDRFILTEEGDHKLSWTLDSQLTPSGQFQALFPVGPVTPSHRWMLRCYGSRRHILQVWSEPSDLLEIPVSGAADNLSPSQNKSDSGTASHLQDYAVENLIRMGMAGLILVVLGILIFQDWHSQRSPQAAAGR

SEQ ID NO: 88 - DNA, 110 bp, Homo sapiens
cccagtcacctccatgttcactgggtctgcctttaaccgcagcatccatcgggtcttccaggataagcagattgaggacctgtggctgccttacttcaacgtgaccacag

SEQ ID NO: 89 - DNA, 4536 bp, Homo sapiens
acgcctcccagcaatggcgccaccatcggtcccggagtcccagtgatgctctgtgccatagagcccccataacttcactactacgtgatagtaaatccccggcaaaaaccagcagcgccttgcaagcccacgccaccccaagcatcccaggactcttctgaaacgactccgggctaccagatcggccgtccagctggaatcaaccgatggaggctccgctgcaaactggaatgatggggacatcgagtcacgggctggctacgaactcctcgggggcgaaggtggcggagagggatgggttccaggacgtcctggcgcccggggaaggctcggcgggacggatttgcggtgcgcagccagtgccgttcgtccctcaggtgcttggcgtgatgatcggggccggagtggcggtggtggtcacggccgtgctcatcctcctggtggtgcggaggctgcgagtgccaaaaaccccagccccggatggcccccggtatcggttccggaagagggacaaagtgctcttctatggccggaagattatgcggaaggtgtcacaatccacctcctccctcgtggatacctctgtctccgccacctcccggccacgcatgaggaagaaactgaagatgctcaacattgccaagaagatcctgcgcatccagaaagagacgcccacgctgcagcggaaggagcccccgcccgcagtgctagaagctgacctgaccgagggcgacctggctaactcccatctgccctctgaagtgctttatatgctcaagaacgtccgggtgctgggccacttcgagaagccactcttcctggagctctgccgccacatggtcttccagcggctgggccagggtgactacgtcttccggccgggccagccagatgccagcatctacgtggtgcaggacgggctgctggagctctgtctgccagggcctgacgggaaggagtgtgtggtgaaggaagtggttcctggggacagcgtcaacagccttctcagcatcctggatgtcatcaccggtcaccagcatccccagcggaccgtgtctgcccgggcggcccgggactccacggtgctgcgcctgccggtggaagcattctccgcggtcttcaccaagtacccggagagcttggtgcgggtcgtgcagatcatcatggtgcggctgcagcgagtcaccttcctggcactgcacaactacctgggtctgaccaatgagctcttcagccacgagatccagcccctgcgtctgttccccagccccggcctcccaactcgcaccagccctgtgcggggctccaagagaatggtcagcacctcagctacagacgagcccagggagaccccagggcggccacccgatcccaccggggccccgctgcctggacctacaggggaccctgtgaagcccacatccctggaaaccccctcggcccctctgctgagccgctgcgtctccatgccaggggacatctcaggcttgcagggtggcccccgctccgacttcgacatggcctatgagcgtggccggatctccgtgtccctgcaggaagaggcctccggggggtccctggcagcccccgctcggacccccactcaggagcctcgtgagcagccggcaggcgcctgtgaatacagctactgtgaggatgagtcggccactggtggctgccctttcgggccctaccagggccgccagaccagcagcatcttcgaggcagcaaagcaggagctggccaagctgatgcggattgaggacccctccctcctgaacagcagagtcttgctgcaccacgccaaagctggcaccatcattgcccgccagggagaccaggacgtgagcctgcacttcgtgctctggggctgcctgcacgtgtaccagcgcatgatcgacaaggcggaggacgtgtgcctgttcgtagcgcagcccggggaactggtggggcagctggcggtgctcactggcgaacctctcatcttcacactgcgagcccaacgcgactgcaccttcctgcggatctccaagtccgacttctatgagatcatgcgcgcacagcccagtgtggtgctgagtgcggcgcacacggtggcagccaggatgtcgcccttcgtgcgccagatggacttcgccatcgactggactgcagtggaggcgggacgcgcgctgtacaggcagggcgaccgctccgactgcacttacatcgtgctcaatgggcggctgcgtagcgtgatccagcgaggcagtggcaagaaggagctggtgggcgagtacggccgcggcgacctcatcggcgtggtggaggcactgacccggcagccgcgagccacgacggtgcacgcggtgcgcgacacggagctggccaagcttcccgagggcaccttgggtcacatcaaacgccggtacccgcaggtcgtgacccgccttatccacctactgagccagaaaattctagggaatttgcagcagctgcaaggacccttcccagcaggctctgggttgggtgtgcccccacactcggaactcaccaacccagccagcaacctggcaactgtggcaatcctgcctgtgtgtgctgaggtccccatggtggccttcacgctggagctgcagcacgccctgcaggccatcggtccgacgctactccttaacagtgacatcatccgggcacgcctgggggcctccgcactggatagcatccaagagttccggctgtcagggtggctggcccagcaggaggatgcacaccgtatcgtactctaccagacggacgcctcgctgacgccctggaccgtgcgctgcctgcgacaggccgactgcatcctcattgtgggcctgggggaccaggagcctaccctcggccagctggagcagatgctggagaacacggctgtgcgcgcccttaagcagctagtcctgctccaccgagaggagggcgcgggccccacgcgcaccgtggagtggctaaatatgcgcagctggtgctcggggcacctgcacctgcgctgtccgcgccgcctcttttcgcgccgcagccctgccaagctgcatgagctctacgagaaggttttctccaggcgcgcggaccggcacagcgacttctcccgcttggcgagggtgctcacggggaacaccattgcccttgtgctaggcgggggcggggccaggggctgctcgcacatcggagtactaaaggcattagaggaggcgggggtccccgtggacctggtgggcggcacgtccattggctctttcatcggagcgttgtacgcggaggagcgcagcgccagccgcacgaagcagcgggcccgggagtgggccaagagcatgacttcggtgctggaacctgtgttggacctcacgtacccagtcacctccatgttcactgggtctgcctttaaccgcagcatccatcgggtcttccaggataagcagattgaggacctgtggctgccttacttcaacgtgaccacagatatcaccgcctcagccatgcgagtccacaaagatggctccctgtggcggtacgtgcgcgccagcatgacgctgtcgggctacctgcccccgctgtgcgaccccaaggacgggcacctactcatggatggcggctacatcaacaatctgccagcggacatcgcccgcagcatgggtgccaaaacggtcatcgccattgacgtggggagccaggatgagacggacctcagcacctacggggacagcctgtccggctggtggctgctgtggaagcggctgaatccctgggctgacaaggtaaaggttccagacatggctgaaatccagtcccgcctggcctacgtgtcctgtgtgcggcagctagaggttgtcaagtccagctcctactgcgagtacctgcgcccgcccatcgactgcttcaagaccatggactttgggaagttcgaccagatctatgatgtgggctaccagtacgggaaggcggtgtttggaggctggagccgtggcaacgtcattgagaaaatgctcacagaccggcggtctacagaccttaatgagagccgccgtgcagacgtgcttgccttcccaagctctggcttcactgacttggcagagattgtgtcccggattgagccccccacgagctatgtctctgatggctgtgctgacggagaggagtcagattgtctgacagagtatgaggaggacgccggacccgactgctcgagggatgaaggggggtcccccgagggcgcaagccccagcactgcctccgagatggaggaggagaagtcgattctccggcaacgacgctgtctgccccaggagccgcccggctcagccacagatgcctgaggacctcgacaggggtcaccccctccctcccacccctggactgggctgggggtggccccgtgggggtagctcactccccctcctgctgctatgcctgtgacccccgcggcccacacactggactgacctgccctgagcggggatgcagtgttgcactgatgacttgaccagcccctcccccaataaactcgcctcttggaaa

SEQ ID NO: 90 - protein, 1375 aa, Homo sapiens
MEAPLQTGMMGTSSHGLATNSSGAKVAERDGFQDVLAPGEGSAGRICGAQPVPFVPQVLGVMIGAGVAVVVTAVLILLVVRRLRVPKTPAPDGPRYRFRKRDKVLFYGRKIMRKVSQSTSSLVDTSVSATSRPRMRKKLKMLNIAKKILRIQKETPTLQRKEPPPAVLEADLTEGDLANSHLPSEVLYMLKNVRVLGHFEKPLFLELCRHMVFQRLGQGDYVFRPGQPDASIYVVQDGLLELCLPGPDGKECVVKEVVPGDSVNSLLSILDVITGHQHPQRTVSARAARDSTVLRLPVEAFSAVFTKYPESLVRVVQIIMVRLQRVTFLALHNYLGLTNELFSHEIQPLRLFPSPGLPTRTSPVRGSKRMVSTSATDEPRETPGRPPDPTGAPLPGPTGDPVKPTSLETPSAPLLSRCVSMPGDISGLQGGPRSDFDMAYERGRISVSLQEEASGGSLAAPARTPTQEPREQPAGACEYSYCEDESATGGCPFGPYQGRQTSSIFEAAKQELAKLMRIEDPSLLNSRVLLHHAKAGTIIARQGDQDVSLHFVLWGCLHVYQRMIDKAEDVCLFVAQPGELVGQLAVLTGEPLIFTLRAQRDCTFLRISKSDFYEIMRAQPSVVLSAAHTVAARMSPFVRQMDFAIDWTAVEAGRALYRQGDRSDCTYIVLNGRLRSVIQRGSGKKELVGEYGRGDLIGVVEALTRQPRATTVHAVRDTELAKLPEGTLGHIKRRYPQVVTRLIHLLSQKILGNLQQLQGPFPAGSGLGVPPHSELTNPASNLATVAILPVCAEVPMVAFTLELQHALQAIGPTLLLNSDIIRARLGASALDSIQEFRLSGWLAQQEDAHRIVLYQTDASLTPWTVRCLRQADCILIVGLGDQEPTLGQLEQMLENTAVRALKQLVLLHREEGAGPTRTVEWLNMRSWCSGHLHLRCPRRLFSRRSPAKLHELYEKVFSRRADRHSDFSRLARVLTGNTIALVLGGGGARGCSHIGVLKALEEAGVPVDLVGGTSIGSFIGALYAEERSASRTKQRAREWAKSMTSVLEPVLDLTYPVTSMFTGSAFNRSIHRVFQDKQIEDLWLPYFNVTTDITASAMRVHKDGSLWRYVRASMTLSGYLPPLCDPKDGHLLMDGGYINNLPADIARSMGAKTVIAIDVGSQDETDLSTYGDSLSGWWLLWKRLNPWADKVKVPDMAEIQSRLAYVSCVRQLEVVKSSSYCEYLRPPIDCFKTMDFGKFDQIYDVGYQYGKAVFGGWSRGNVIEKMLTDRRSTDLNESRRADVLAFPSSGFTDLAEIVSRIEPPTSYVSDGCADGEESDCLTEYEEDAGPDCSRDEGGSPEGASPSTASEMEEEKSILRQRRCLPQEPPGSATDA

SEQ ID NO: 91 - DNA, 104 bp, Homo sapiens
caagccgcctgtgggaagctgtgcatccggagatgtgagtttggggctgaagaagagtggctgaccctgtgcccagaggagttcctgacaggccattactgggc

SEQ ID NO: 92 - DNA, 2290 bp, Homo sapiens
gcacccctccctcggctccgcccgcggcccgcttcttcctcccgcgggcggcccagccctagcgccccgcgctccgcgggcagccccctgccgccgcgccatgtccgccggctggttccggcgccgcttcctgcctggggagccgctccccgcgccgcggccgcctgggccgcatgccagccccgtgccctaccgacggccccgcttccttcgcggctccagctccagccccggggcggccgacgcctcgcgccgcccagactcccggcccgtgcgcagccccgcacgaggacgcacgctaccctggaatgcaggctacgccgagattatcaatgcagagaaatctgaattcaatgaggatcaagccgcctgtgggaagctgtgcatccggagatgtgagtttggggctgaagaagagtggctgaccctgtgcccagaggagttcctgacaggccattactgggcactgttcgatgggcacggcggtcctgcagcagccatcttggctgccaacaccctgcactcctgcttgcgccggcagctggaggccgtggtggaaggcttggtggccactcagccccccatgcacctcaatggccgctgcatctgccccagtgaccctcagtttgtggaggaaaagggcatcagggcagaagacttggtgatcggggcattggagagtgcctttcaggaatgtgatgaggtgatcgggcgggagctggaggcctcaggccagatgggcggctgcacagccctggtggctgtgtccctgcagggaaagctgtacatggccaatgctggggatagcagggccatcttggtgcggagagatgagatacggccactgagcttcgagttcaccccagagactgagcggcagcggatccagcagctggcctttgtctatcctgagcttctggctggtgagttcacccgactggagttccctcggcggctgaagggggatgacttgggacagaaggttttgttcagggatcaccacatgagtggctggagctacaaacgtgtggagaaatcggatctcaagtacccactgatccatggacagggtaggcaggctcggttactaggaacactggctgtctcccggggcctgggagaccatcagctcagagtcctggacacaaacatccagctcaagcccttcttgctctctgtgccacaggtgactgtgctggatgtggaccagctggagctacaggaggatgatgtggttgtcatggcaactgatggactctgggatgtactgtccaacgagcaggtggcatggctggtgcggagcttcctccctgggaaccaagaggacccacacagtctatctgcaggatggtcttcacaggttctcaaagctggcccagatgctgatacacagcacacagggaaaggaagacagtctcacagaggaagggcaggtgtcctacgatgacgtctctgtgttcgtgattcccttgcacagtcagggccaagagagcagtgaccactgaggattcagacactgtatcccagaactgctctagtgcccgggtgtggtctgggcatccctccagtgtgaccaagagcaaatcctgcctgccctatccctagccaccgcccagtgctctcactatccacctcaacacacatccatctcaagaggaacatttataccaggcagtcagagctggaagtgtatggagagcccagcccaccaggtcctgccttttgcggtgataaccttctctggcagagtgactttacaacttaactaggaaacccatgtgaggctcctcagacaggatcttgaacagcccaaagtatcattctcagataggggcacccaagctaagggtattagccaaagatgccaggatgggtagctagcccatgtttagatccaggtctccaattcatggttatcagggcatgtgttcaacaacccccaaagtccacgcaggtggcttgtagaaacctttgggcagcctcatgtctgctaaaacagccatcttcaagacagcccctgaaaagagaccagttcaggtcctgccctgctgttctttgctggagatgaggaacaggtgctggggctaaagtttggggtagagcacaagggacaagaggaactcttggagttggctgggtgagagggctctccatttgctacctgtagtagcctgcctcttaactggttgcttctccctagttccagccctgccctggtctgatgccccaacactgcccttgctttgttttccctgtcacctccctattattaaatgttttctacagaaga

SEQ ID NO: 93 - protein, 448 aa, Homo sapiens
MSAGWFRRRFLPGEPLPAPRPPGPHASPVPYRRPRFLRGSSSSPGAADASRRPDSRPVRSPARGRTLPWNAGYAEIINAEKSEFNEDQAACGKLCIRRCEFGAEEEWLTLCPEEFLTGHYWALFDGHGGPAAAILAANTLHSCLRRQLEAVVEGLVATQPPMHLNGRCICPSDPQFVEEKGIRAEDLVIGALESAFQECDEVIGRELEASGQMGGCTALVAVSLQGKLYMANAGDSRAILVRRDEIRPLSFEFTPETERQRIQQLAFVYPELLAGEFTRLEFPRRLKGDDLGQKVLFRDHHMSGWSYKRVEKSDLKYPLIHGQGRQARLLGTLAVSRGLGDHQLRVLDTNIQLKPFLLSVPQVTVLDVDQLELQEDDVVVMATDGLWDVLSNEQVAWLVRSFLPGNQEDPHSLSAGWSSQVLKAGPDADTQHTGKGRQSHRGRAGVLR

SEQ ID NO: 94 - DNA, 101 bp, Homo sapiens
tgaaggaccagtatgccaactacgtggtccagaagatgattgacgtggcggagccaggccagcggaagatcgtcatgcataagatccggccccacatcgca

SEQ ID NO: 95 - DNA, 5379 bp, Homo sapiens
agtgggccgccatgttgtcggagtgaaaggtaagggggagcgagagcgccagagagagaagatcggggggctgaaatccatcttcatcctaccgctccgcccgtgttggtggaatgagcgttgcatgtgtcttgaagagaaaagcagtgctttggcaggactctttcagcccccacctgaaacatcaccctcaagaaccagctaatcccaacatgcctgttgttttgacatctggaacagggtcgcaagcgcagccacaaccagctgcaaatcaggctcttgcagctgggactcactccagccctgtcccaggatctataggagttgcaggccgttcccaggacgacgctatggtggactacttctttcagaggcagcatggtgagcagcttgggggaggaggaagtggaggaggcggctataataatagcaaacatcgatggcctactggggataacattcatgcagaacatcaggtgcgttccatggatgaactgaatcatgattttcaagcacttgctctggagggaagagcgatgggagagcagctcttgccaggtaaaaagttttgggaaacagatgaatccagcaaagatggaccaaaaggaatattcctgggtgatcaatggcgagacagtgcctggggaacatcagatcattcagtttcccagccaatcatggtgcagagaagacctggtcagagtttccatgtgaacagtgaggtcaattctgtactgtccccacgatcggagagtgggggactaggcgttagcatggtggagtatgtgttgagctcatccccgggcgattcctgtctaagaaaaggaggatttggcccaagggatgcagacagtgatgaaaacgacaaaggtgaaaagaagaacaagggtacgtttgatggagataagctaggagatttgaaggaggagggtgatgtgatggacaagaccaatggtttaccagtgcagaatgggattgatgcagacgtcaaagattttagccgtacccctggtaattgccagaactctgctaatgaagtggatcttctgggtccaaaccagaatggttctgagggcttagcccagctgaccagcaccaatggtgccaagcctgtggaggatttctccaacatggagtcccagagtgtccccttggaccccatggaacatgtgggcatggagcctcttcagtttgattattcaggcacgcaggtacctgtggactcagcagcagcaactgtgggactttttgactacaattctcaacaacagctgttccaaagacctaatgcgcttgctgtccagcagttgacagctgctcagcagcagcagtatgcactggcagctgctcatcagccgcacatcggtttagctcccgctgcgtttgtccccaatccatacatcatcagcgctgctcccccagggacggacccctacacagctggattggctgcagcagcgacactaggcccagctgtggtccctcaccagtattatggagttactccctggggagtctaccctgccagtcttttccagcagcaagctgccgctgccgctgcagcaactaattcagctaatcaacagaccaccccacaggctcagcaaggacagcagcaggttctccgtggaggagccagccaacgtcctttgaccccaaaccagaaccagcagggacagcaaacggatccccttgtggcagctgcagcagtgaattctgcccttgcatttggacaaggtctggcagcaggcatgccaggttatccggtgttggctcctgctgcttactatgaccaaactggtgcccttgtagtgaatgcaggcgcgagaaatggtcttggagctcctgttcgacttgtagctcctgccccagtcatcattagttcctcagctgcacaagcagctgttgcagcagccgcagcttcagcaaatggagcagctggtggtcttgctggaacaacaaatggaccatttcgccctttaggaacacagcagcctcagccccagccccagcagcagcccaataacaacctggcatccagttctttctacggcaacaactctctgaacagcaattcacagagcagctccctcttctcccagggctctgcccagcctgccaacacatccttgggattcggaagtagcagttctctcggcgccaccctgggatccgcccttggagggtttggaacagcagttgcaaactccaacactggcagtggctcccgccgtgactccctgactggcagcagtgacctttataagaggacatcgagcagcttgacccccattggacacagtttttataacggccttagcttttcctcctctcctggacccgtgggcatgcctctccctagtcagggaccaggacattcacagacaccacctccttccctctcttcacatggatcctcttcaagcttaaacctgggaggactcacgaatggcagtggaagatacatctctgctgctccaggcgctgaagccaagtaccgcagtgcaagcagcgcctccagcctcttcagcccgagcagcactcttttctcttcctctcgtttgcgatatggaatgtctgatgtcatgccttctggcaggagcaggcttttggaagattttcgaaacaaccggtaccccaatttacaactgcgggagattgctggacatataatggaattttcccaagaccagcatgggtccagattcattcagctgaaactggagcgtgccacaccagctgagcgccagcttgtcttcaatgaaatcctccaggctgcctaccaactcatggtggatgtgtttggtaattacgtcattcagaagttctttgaatttggcagtcttgaacagaagctggctttggcagaacggattcgaggccacgtcctgtcattggcactacagatgtatggctgccgtgttatccagaaagctcttgagtttattccttcagaccagcagaatgagatggttcgggaactagatggccatgtcttgaagtgtgtgaaagatcagaatggcaatcacgtggttcagaaatgcattgaatgtgtacagccccagtctttgcaatttatcatcgatgcgtttaagggacaggtatttgccttatccacacatccttatggctgccgagtgattcagagaatcctggagcactgtctccctgaccagacactccctattttagaggagcttcaccagcacacagagcagcttgtacaggatcaatatggaaattatgtaatccaacatgtactggagcacggtcgtcctgaggataaaagcaaaattgtagcagaaatccgaggcaatgtacttgtattgagtcagcacaaatttgcaagcaatgttgtggagaagtgtgttactcacgcctcacgtacggagcgcgctgtgctcatcgatgaggtgtgcaccatgaacgacggtccccacagtgccttatacaccatgatgaaggaccagtatgccaactacgtggtccagaagatgattgacgtggcggagccaggccagcggaagatcgtcatgcataagatccggccccacatcgcaactcttcgtaagtacacctatggcaagcacattctggccaagctggagaagtactacatgaagaacggtgttgacttagggcccatctgtggcccccctaatggtatcatctgaggcagtgtcacccgctgttccctcattcccgctgacctcactggcccactggcaaatccaaccagcaaccagaaatgttctagtgtagagtctgagacgggcaagtggttgctccaggattactccctcctccaaaaaaggaatcaaatccacgagtggaaaagcctttgtaaatttaattttattacacataacatgtactattttttttaattgactaattgccctgctgttttactggtgtataggatacttgtacataggtaaccaatgtacatgggaggccacatattttgttcactgttgtatctatatttcacatgtggaaactttcagggtggttggtttaacaaaaaaaaaaagctttaaaaaaaaaagaaaaaaaggaaaaggtttttagctcatttgcctggccggcaagttttgcaaatagctcttccccacctcctcattttagtaaaaaacaaacaaaaacaaaaaaacctgagaagtttgaattgtagttaaatgaccccaaactggcatttaacactgtttataaaaaatatatatatatatatatatatatataatgaaaaaggtttcagagttgctaaagcttcagtttgtgacattaagtttatgaaattctaaaaaatgccttttttggagactatattatgctgaagaaggctgttcgtgaggaggagatgcgagcacccagaacgtcttttgaggctgggcgggtgtgattgtttactgcctactggatttttttctattaacattgaaaggtaaaatctgattatttagcatgagaaaaaaaaatccaactctgcttttggtcttgcttctataaatatatagtgtatacttggtgtagactttgcatatatacaaatttgtagtattttcttgttttgatgtctaatctgtatctataatgtaccctagtagtcgaacatacttttgattgtacaattgtacatttgtatacctgtaatgtaaatgtggagaagtttgaatcaacataaacacgttttttggtaagaaaagagaattagccagccctgtgcattcagtgtatattctcaccttttatggtcgtagcatatagtgttgtatattgtaaattgtaatttcaaccagaagtaaatttttttcttttgaaggaataaatgttctttatacagcctagttaatgtttaaaaagaaaaaaatagcttggttttatttgtcatctagtctcaagtatagcgagattctttctaaatgttattcaagattgagttctcactagtgtttttttaatcctaaaaaagtaatgttttgattttgtgacagtcaaaaggacgtgcaaaagtctagccttgcccgagctttccttacaatcagagcccctctcaccttgtaaagtgtgaatcgcccttcccttttgtacagaagatgaactgtattttgcattttgtctacttgtaagtgaatgtaacatactgtcaattttccttgtttgaatatagaattgtaacactacacggtgtacatttccagagccttgtgtatatttccaatgaacttttttgcaagcacacttgtaaccatatgtgtataattaacaaacctgtgtatgcttatgcctgggcaactattttttgtaactcttgtgtagattgtctctaaacaatgtgtgatctttattttgaaaaatacagaactttggaatctg

SEQ ID NO: 96 - protein, 1186 aa, Homo sapiens
MSVACVLKRKAVLWQDSFSPHLKHHPQEPANPNMPVVLTSGTGSQAQPQPAANQALAAGTHSSPVPGSIGVAGRSQDDAMVDYFFQRQHGEQLGGGGSGGGGYNNSKHRWPTGDNIHAEHQVRSMDELNHDFQALALEGRAMGEQLLPGKKFWETDESSKDGPKGIFLGDQWRDSAWGTSDHSVSQPIMVQRRPGQSFHVNSEVNSVLSPRSESGGLGVSMVEYVLSSSPGDSCLRKGGFGPRDADSDENDKGEKKNKGTFDGDKLGDLKEEGDVMDKTNGLPVQNGIDADVKDFSRTPGNCQNSANEVDLLGPNQNGSEGLAQLTSTNGAKPVEDFSNMESQSVPLDPMEHVGMEPLQFDYSGTQVPVDSAAATVGLFDYNSQQQLFQRPNALAVQQLTAAQQQQYALAAAHQPHIGLAPAAFVPNPYIISAAPPGTDPYTAGLAAAATLGPAVVPHQYYGVTPWGVYPASLFQQQAAAAAAATNSANQQTTPQAQQGQQQVLRGGASQRPLTPNQNQQGQQTDPLVAAAAVNSALAFGQGLAAGMPGYPVLAPAAYYDQTGALVVNAGARNGLGAPVRLVAPAPVIISSSAAQAAVAAAAASANGAAGGLAGTTNGPFRPLGTQQPQPQPQQQPNNNLASSSFYGNNSLNSNSQSSSLFSQGSAQPANTSLGFGSSSSLGATLGSALGGFGTAVANSNTGSGSRRDSLTGSSDLYKRTSSSLTPIGHSFYNGLSFSSSPGPVGMPLPSQGPGHSQTPPPSLSSHGSSSSLNLGGLTNGSGRYISAAPGAEAKYRSASSASSLFSPSSTLFSSSRLRYGMSDVMPSGRSRLLEDFRNNRYPNLQLREIAGHIMEFSQDQHGSRFIQLKLERATPAERQLVFNEILQAAYQLMVDVFGNYVIQKFFEFGSLEQKLALAERIRGHVLSLALQMYGCRVIQKALEFIPSDQQNEMVRELDGHVLKCVKDQNGNHVVQKCIECVQPQSLQFIIDAFKGQVFALSTHPYGCRVIQRILEHCLPDQTLPILEELHQHTEQLVQDQYGNYVIQHVLEHGRPEDKSKIVAEIRGNVLVLSQHKFASNVVEKCVTHASRTERAVLIDEVCTMNDGPHSALYTMMKDQYANYVVQKMIDVAEPGQRKIVMHKIRPHIATLRKYTYGKHILAKLEKYYMKNGVDLGPICGPPNGII

SEQ ID NO: 97 - DNA, 104 bp, Homo sapiens
gcaacgtgcaccccgccctaggagcacacttcatcgcacgggacccctatgacctgatgggggctgctctgatccctgcatccccagaggcctgggccccctac

SEQ ID NO: 98 - DNA, 2017 bp, Homo sapiens
gcactcgccggtcgcagtgaaaaggcggaggcggcggcccctccggctcccactgcctcccccgccgcaccccctccccaccttccgcacccgccaaacttgatgtgaccctggcccgacgcggaggctgcccctctcactgccccgtgggtcccccgccacccgctccgcacccgcgagcgcaccgctccccgcgccccttcccacttcccgcggggccggcgccgcgctcgccctcgcgttccttcccgccgccccctcccccgcaccatgagcaacctgaagccggacggcgagcacggcggcagcaccggcaccggctccggcgcgggctccggcggcgccctggaggaggaggtccggacactgtttgtcagcggcctccctgtggacattaaacccagagaactctacttgctcttccggccgttcaaggggtatgaagggtccctgatcaagctcactgcaagacagcctgttggttttgtgatctttgacagccgtgcaggagcagaagcggccaagaatgcgctgaacggtattcgctttgatcccgaaaatccacagactctgaggctagagtttgccaaagccaacaccaagatggccaagagcaagctaatggcaactccaaatcccagcaacgtgcaccccgccctaggagcacacttcatcgcacgggacccctatgacctgatgggggctgctctgatccctgcatccccagaggcctgggccccctaccctttgtacaccacagagctgaccccagccatctcccatgctgcgttcacctacccaactgccactgccgctgccgccgccctccacgctcaggtgcgctggtacccttcctctgacaccacccagcaaggatggaagtaccgtcagttctgttagtttttcagtctggtcaccggggaggtggttctggtaatctgtggtggtgccgggacaggcgccccgagttcccactgcccccgggcggcctgcacagagctgctgccctccagagactgtgaatcccaagcctgactcagtggactgcttcctgttcccctccctcctcttcctcaccttgttctgcaccctcaagcctttctccaatgcctcccaggaggatttggggactttctccctggggcgcccagatccagctcggaggcctcactgggacctggcaaggcctgacctcccgcccaaacttgcttctgtagctccccctcgaggaagtgaggtgtttaattttgcatgttttctggcatgaattaagacacttatacttgtatatatgagtgtacagtttgttctcacactgtcaccatagcgacaggtcctggctcccagtggttcatcctgcctgcccctctctcctcgccccgcccctgcacccaccccgcttcagggaggcccaagttccgtggccccacacgcttccaggctcagctcccacctccacccaacagatagatggggtttgctttttcatttcacatggggctcctccgctcctgccttctcggatgggccaacagtcgtaagaaagccctctctgcccgttctgttcacctctccacagcgcaccccgcccgccgctgctcctcattctttccaaacctcgaaaccaaccaaaacgtgagaagtatttttgtaccctgtgtaacaaaatatttatgcatcataaaggatttttcatgtgcgtaccattaattattaaagcgacctcgttcgccctgtcagataagtttaatgtttagtttgaggcatgaagaagaaaagggtttccattcttcagcagtacgcctttgtgtctggcatttgtttaagaaaatgaaatgaaggaaacactgtgcaatgttttttgttttgagcatatcagtgctttactgtcagccgcagctgtgaccgtctggccatttcagacttgggagatgaggcggctgttgtcattgctgatcctgtgagaatgtgaaactggataatatatgaaatgcaaaataaaacaaaaccaaaatga

SEQ ID NO: 99 - protein, 209 aa, Homo sapiens
MSNLKPDGEHGGSTGTGSGAGSGGALEEEVRTLFVSGLPVDIKPRELYLLFRPFKGYEGSLIKLTARQPVGFVIFDSRAGAEAAKNALNGIRFDPENPQTLRLEFAKANTKMAKSKLMATPNPSNVHPALGAHFIARDPYDLMGAALIPASPEAWAPYPLYTTELTPAISHAAFTYPTATAAAAALHAQVRWYPSSDTTQQGWKYRQFC

SEQ ID NO: 100 - DNA, 105 bp, Homo sapiens
gggtttggtttggggaagaaactacaacagaaacacccagaagatgtgctcagctatccccagctttttgcagctgggatgttatctggcgtattcaccacagga

SEQ ID NO: 101 - DNA, 1778 bp, Homo sapiens
gaaaggtcggcggcgccggcactgcagctggggctgagaagccaggacggcccgagaactgacagacggagtgacagacggactgaccatggccgaccagccaaaacccatcagcccgctcaagaacctgctggccggcggctttggcggcgtgtgcctggtgttcgtcggtcaccctctggacacggtcaaggtccgactgcagacacagccaccgagtttgcctggacaacctcccatgtactctgggacctttgactgtttccggaagactctttttagagagggcatcacggggctatatcggggaatggctgcccctatcatcggggtcactcccatgtttgccgtgtgcttctttgggtttggtttggggaagaaactacaacagaaacacccagaagatgtgctcagctatccccagctttttgcagctgggatgttatctggcgtattcaccacaggaatcatgactcctggagaacggatcaagtgcttattacagattcaggcttcttcaggagaaagcaagtacactggtaccttggactgtgcaaagaagctgtaccaggagtttgggatccgaggcatctacaaagggactgtgcttacccttatgcgagatgtcccagctagtggaatgtatttcatgacatatgaatggctgaaaaatatcttcactccggagggaaagagggtcagtgagctcagtgcccctcggatcttggtggctgggggcattgcagggatcttcaactgggctgtggcaatccccccagatgtgctcaagtctcgattccagactgcacctcctgggaaatatcctaatggtttcagagatgtgctgagggagctgatccgggatgaaggagtcacatccttgtacaaagggttcaatgcagtgatgatccgagccttcccagccaatgcggcctgtttccttggctttgaagttgccatgaagttccttaattgggccacccccaacttgtgaggctgaaggctgctcaagttcacttctggatgctggaagctgtcgttgaggagaaggagtagtaagcagaactaagcagtcttggagggcaaggggaggggaatggtgagatccgagccctgtgcatggacttggtgagactgttgccttaatgacatcctgcaccgtgtataacttagtgtgtcattttgaaacttgaattcattcttatcaatttaagggatcttaaaaggatttggaaatggaacaagtagcttccagaccagatactacctgtggcaagaatgctgcctaccagttaactgctggtcctaccacagtcaaagtattcctcattaaagagagaatctcaggttctcactggaggcactgtgcatattttcaaccagatcaccaggagctgagatcttcttcagtccctagccaggaatacccatttgatttccagggtgccatctaatcctgggctgtacatgtggatatggacttgaggcccacctctgtgtccaagtggattgagcatatatgcctaggaggagatagactgttaatcgttggattttgattttttttttttatgcctgcaaataatcaaaagtaaaactggagtagcctaattttctgggagcaggtggagaactttccctcctacacagtgaggacagtcccagtctgctgggataagtgagaaagcccagggtgtaggaaggccctttttacatactcttttctcatgagagctcactattttaacaataaacaataaacgttgtttctaattttt

SEQ ID NO: 102 - protein, 301 aa, Homo sapiens
MADQPKPISPLKNLLAGGFGGVCLVFVGHPLDTVKVRLQTQPPSLPGQPPMYSGTFDCFRKTLFREGITGLYRGMAAPIIGVTPMFAVCFFGFGLGKKLQQKHPEDVLSYPQLFAAGMLSGVFTTGIMTPGERIKCLLQIQASSGESKYTGTLDCAKKLYQEFGIRGIYKGTVLTLMRDVPASGMYFMTYEWLKNIFTPEGKRVSELSAPRILVAGGIAGIFNWAVAIPPDVLKSRFQTAPPGKYPNGFRDVLRELIRDEGVTSLYKGFNAVMIRAFPANAACFLGFEVAMKFLNWATPNL

SEQ ID NO: 103 - DNA, 100 bp, Homo sapiens
caggagagacttgtgaatgaaacccgagagtgtcaaagcttgcggcttgagctagagaaactcaacaatcaactgaaggcactaactgagaaaaacaaag

SEQ ID NO: 104 - DNA, 9636 bp, Homo sapiens
cttcggtcgcgggcggtgaggtgctgttgctgaaacgctgccgctgagggtggactcgatttcccagggtcccgccgcgggagtctccggcgggcgggcgcgcgcgagccaccgagcgaggtgatagaggcggcggcccaggcgtctgggtcctgctggtcttcgcctttcttctccgcttctaccccgtcggccgctgccactggggtccctggccccaccgacatggcggcggtgttgcagcaagtcctggagcgcacggagctgaacaagctgcccaagtctgtccagaacaaacttgaaaagttccttgctgatcagcaatccgagatcgatggcctgaaggggcggcatgagaaatttaaggtggagagcgaacaacagtattttgaaatagaaaagaggttgtcccacagtcaggagagacttgtgaatgaaacccgagagtgtcaaagcttgcggcttgagctagagaaactcaacaatcaactgaaggcactaactgagaaaaacaaagaacttgaaattgctcaggatcgcaatattgccattcagagccaatttacaagaacaaaggaagaattagaagctgagaaaagagacttaattagaaccaatgagagactatctcaagaacttgaatacttaacagaggatgttaaacgtctgaatgaaaaacttaaagaaagcaatacaacaaagggtgaacttcagttaaaattggatgaacttcaagcttctgatgtttctgttaagtatcgagaaaaacgcttggagcaagaaaaggaattgctacatagtcagaatacatggctgaatacagagttgaaaaccaaaactgatgaacttctggctcttggaagagaaaaagggaatgagattctagagcttaaatgtaatcttgaaaataaaaaagaagaggtttctagactggaagaacaaatgaatggcttaaaaacatcaaatgaacatcttcaaaagcatgtggaggatctgttgaccaaattaaaagaggccaaggaacaacaggccagtatggaagagaaattccacaatgaattaaatgcccacataaaactttctaatttgtacaagagtgccgctgatgactcagaagcaaagagcaatgaactaacccgggcagtagaggaactacacaaacttttgaaagaagctggtgaagccaacaaagcaatacaagatcatcttctagaggtggagcaatccaaagatcaaatggaaaaagaaatgcttgagaaaatagggagattggagaaggaattagagaatgcaaatgaccttctttctgccacaaaacgtaaaggagccatattgtctgaagaagagcttgccgccatgtctcctactgcagcagctgtagctaagatagtgaaacctgggatgaaactaactgagctctataatgcttatgtggaaactcaggatcagttgcttttggagaaactagagaacaaaagaattaataagtacctagatgaaatagtgaaagaagtggaagccaaagcaccaattttgaaacgccagcgtgaggaatatgaacgtgcacagaaagctgtagcaagtttatctgttaagcttgaacaagctatgaaggagattcagcgattgcaggaggacactgataaagccaacaagcaatcatctgtacttgagagagataatcgaagaatggaaatacaagtaaaagatctttcacaacagattagagtgcttttgatggaacttgaagaagcaaggggtaaccacgtaattcgtgatgaggaagtaagctctgctgatataagtagttcatctgaggtaatatcacagcatctagtatcttacagaaatattgaagagcttcaacaacaaaatcaacgtctcttagtggcccttagagagcttggggaaaccagagaaagagaagaacaagaaacaacttcatccaaaatcactgagcttcagctcaaacttgagagtgcccttactgaactagaacaactccgcaaatcacgacagcatcaaatgcagcttgttgattccatagttcgtcagcgtgatatgtaccgtattttattgtcacaaacaacaggagttgccattccattacatgcttcaagcttagatgatgtttctcttgcatcaactccaaaacgtccaagtacatcacagactgtttccactcctgctccagtacctgttattgaatcaacagaggctatagaggctaaggctgcccttaaacagttgcaggaaatttttgagaactacaaaaaagaaaaagcagaaaatgaaaaaatacaaaatgagcagcttgagaaacttcaagaacaagttacagatttgcgatcacaaaataccaaaatttctacccagctagattttgcttctaaacgttatgaaatgctgcaagataatgttgaaggatatcgtcgagaaataacatcacttcatgagagaaatcagaaactcactgccacaactcaaaagcaagaacagattatcaatacgatgactcaagatttgagaggagcaaatgagaagctagctgtcgcagaagtaagagcagaaaatttgaagaaggaaaaggaaatgcttaaattgtctgaagttcgtctttctcagcaaagagagtctttgttagctgaacaaagggggcaaaacttactgctaactaatctgcaaacaattcagggaatactggagcgatctgaaacagaaaccaaacaaaggcttagtagccagatagaaaaactggaacatgagatctctcatctaaagaagaagttggaaaatgaggtggaacaaaggcatacacttactagaaatctagatgttcaacttttagatacaaagagacaactggatacagagacaaatcttcatcttaacacaaaagaactattaaaaaatgctcaaaaagaaattgccacattgaaacagcacctcagtaatatggaagtccaagttgcttctcagtcttcacagagaactggtaaaggtcagcctagcaacaaagaagatgtggatgatcttgtgagtcagctaagacagacagaagagcaggtgaatgacttaaaggagagactcaaaacaagtacgagcaatgtggaacaatatcaagcaatggttactagtttagaagaatccctgaacaaggaaaaacaggtgacagaagaagtgcgtaagaatattgaagttcgtttaaaagagtcagctgaatttcagacacagttggaaaagaagttgatggaagtagagaaggaaaaacaagaacttcaggatgataaaagaagagccatagagagcatggaacaacagttatctgaattgaagaaaacactttctagtgttcagaatgaagtacaagaagctcttcagagagcaagcacagctttaagtaatgagcagcaagccagacgtgactgtcaggaacaagctaaaatagctgtggaagctcagaataagtatgagagagaattgatgctgcatgctgctgatgttgaagctctacaagctgcgaaggagcaggtttcaaaaatggcatcagtccgtcagcatttggaagaaacaacacagaaagcagaatcacagttgttggagtgtaaagcatcttgggaggaaagagagagaatgttaaaggatgaagtttccaaatgtgtatgtcgctgtgaagatctggagaaacaaaacagattacttcatgatcagatcgaaaaattaagtgacaaggtcgttgcctctgtgaaggaaggtgtacaaggtccactgaatgtatctctcagtgaagaaggaaaatctcaagaacaaattttggaaattctcagatttatacgacgagaaaaagaaattgctgaaactaggtttgaggtggctcaggttgagagtctgcgttatcgacaaagggttgaacttttagaaagagagctgcaggaactgcaagatagtctaaatgctgaaagggagaaagtccaggtaactgcaaaaacaatggctcagcatgaagaactgatgaagaaaactgaaacaatgaatgtagttatggagaccaataaaatgctaagagaagagaaggagagactagaacaggatctacagcaaatgcaagcaaaggtgaggaaactggagttagatattttacccttacaagaagcaaatgctgagctgagtgagaaaagcggtatgttgcaggcagagaagaagctcttagaagaggatgtcaaacgttggaaagcacgtaaccagcatctagtaagtcaacagaaagatccagatacagaagaatatcggaagctcctttctgaaaaggaagttcatactaagcgtattcaacaattgacagaagaaattggtagacttaaagctgaaattgcaagatcaaatgcatctttgactaacaaccagaacttaattcagagtctgaaggaagatctaaataaagtaagaactgaaaaggaaaccatccagaaggacttagatgccaaaataattgatatccaagaaaaagtcaaaactattactcaagttaagaaaattggacgtaggtacaagactcaatatgaagaacttaaagcacaacaggataaggttatggagacatcggctcagtcctctggagaccatcaggagcagcatgtttcagtccaggaaatgcaggaactcaaagaaacgctcaaccaagctgaaacaaaatcaaaatcacttgaaagtcaagtagagaatctgcagaagacattatctgaaaaagagacagaagcaagaaatctccaggaacagactgtgcaacttcagtctgaactttcacgacttcgtcaggatcttcaagatagaaccacacaggaggagcagctccgacaacagataactgaaaaggaagaaaaaaccagaaaggctattgtagcagcaaagtcaaaaattgcacacttagctggtgtaaaagatcagctaactaaagaaaatgaggagcttaaacaaaggaatggagccttagatcagcagaaagatgaattggatgttcgcattactgcgctaaagtcccaatatgaaggtcgaattagtcgcttggaaagagaactcagggagcatcaagagagacaccttgagcagagagatgagcctcaagaaccttctaataaggtccctgaacagcagagacagatcacattgaaaacaactccagcttctggtgaaagaggaattgccagcacatcagacccaccaacagccaatatcaagccaactcctgttgtgtctactccaagtaaagtgacagctgcagctatggctggaaataagtcaacacccagggctagtatccgcccaatggttacacctgcaactgttacaaatcccactactaccccaacagctacagtgatgcccactacacaagtggaatcacaggaagctatgcagtcagaagggcctgtggaacatgttccagtttttggaagcacaagtggatccgttcgttctactagtcctaatgtccagccttctatctctcaacctattttaactgttcagcaacaaacacaggctacagcttttgtgcaacccactcaacagagtcatcctcagattgagcctgccaatcaagagttatcttcaaacatagtagaggttgttcagagttcaccagttgagcggccttctacttccacagcagtatttggcacagtttcggctacccccagttcttctttgccaaagcgtacacgtgaagaggaagaggatagcaccatagaagcatcagaccaagtctctgatgatacagtggaaatgcctcttccaaagaagttgaaaagtgtcacacctgtaggaactgaggaagaagttatggcagaagaaagtactgatggagaggtagagactcaggtatacaaccaggattctcaagattccattggagaaggagttacccagggagattatacacctatggaagacagtgaagaaacctctcagtctctacaaatagatcttgggccacttcaatcagatcagcagacgacaacttcatcccaggatggtcaaggcaaaggagatgatgtcattgtaattgacagtgatgatgaagaagaggatgatgatgaaaatgatggagaacatgaggattatgaagaggatgaggaagatgatgatgatgatgaagatgacacagggatgggagatgagggtgaagatagtaatgaaggaactggtagtgccgatggcaatgatggttatgaagctgatgatgctgagggtggtgatgggactgatccaggtacagaaacagaagaaagtatgggtggaggtgaaggtaatcacagagctgctgattctcaaaacagtggtgaaggaaatacaggtgctgcagaatcttctttttctcaggaggtttctagagaacaacagccatcatcagcatctgaaagacaggcccctcgagcacctcagtcaccgagacgcccaccacatccacttcccccaagactgaccattcatgccccacctcaggagttgggaccaccagttcagagaattcagatgacccgaaggcagtctgtaggacgtggccttcagttgactccaggaataggtggcatgcaacagcatttttttgatgatgaagacagaacagttccaagtactccaactcttgtggtgccacatcgtactgatggatttgctgaagcaattcattcgccgcaggttgctggtgtccctagattccggtttgggccacctgaagatatgccacaaacaagttctagtcactctgatcttggccagcttgcttctcaaggaggtttaggaatgtatgaaacacccctgttcctagctcatgaagaagagtcaggtggccgaagtgttcccactactccactacaagtagcagccccagtgactgtatttactgagagcaccacctctgatgcttcggaacatgcctctcaatctgttccaatggtgactacatccactggcactttatctacaacaaatgaaacagcaacaggtgatgatggagatgaagtatttgtggaggcagaatctgaaggtattagttcagaagcaggcctagaaattgatagccagcaggaagaagagccggttcaagcatctgatgagtcagatctcccctccaccagccaggatcctccttctagctcatctgtagatactagtagtagtcaaccaaagcctttcagacgagtaagacttcagacaacattgagacaaggtgtccgtggtcgtcagtttaacagacagagaggtgtgagccatgcaatgggagggagaggaggaataaacagaggaaatattaattaaatggtctgtaaacaataacaactgtgaataagattatcaaatctgttttagtgtaatgattgtcaagtttaaaaacatttttatatataaactggtatactcatgtcaatattctttattaataaaatgtttttcagtgtcaaaatttattattcatttcttcattagttgactcctcctttgctcatcagtctaaggacagttgtaccagactttggataaggtctgcccagaacgagtagtaattgctcttgctgttctactaggcacatcaatgttatagtattgatctaaatggaagagaaaacatttttttagttaaaaagaaaacaatgcccaaactaaaaaataacttatgttgactattatgctcaaagacaatgtttatcattttaatagagatgtttttactaattaatttgaactttataacaaaaagaaaaacaattgcctagacttttcagcttttttgatgtttcaaaagattgacatttcaccatctttttgtaaaatcaggttcagctctcctttatgaagtaaacattaaagagtaaccaagtttgaaaaataatttacttggggttattccttttaaaaaatacatgccaatgtcattcatattatgaaattacaggcagaataacttagatttctgggcatttcaaagaaaagcatcctgagtaatataatttaattaataaaattagtttctcaggaacttctttctgatcttacagactctgcagtgatgcaaatcattataaccttgtgccaaacaaggtatctgttaaatgccacaaatgatagaagtaaaatactattgtcagtagcaagtttactctagtaactggatgttttatcgtaatctcatgaaggttagagcagaattgaattgcagtgccatcattttaattgaaattaaagcaaaagtcttaactcttttccacagcaattagaataagtaccgtagtgtaacttctcacattcagtcatcattgcagccagcatttttactttatcttcatgttttcacaaatgatatcacctccttgggaaactgttagttaataccttacctttagaaaaggcatagtaatcatagccgtcaggttttctgatgttgggcagtgatatagctgaggtaaccacatttggaagtcctctccacagtatactcactttaacttcattatgaaggacacctgtaagtggcatgtttaataaaagataccagattaaaaggcaatgtactatcttggaaagagccagacatctgagttttaatctcagttttagccctctgatgtagaactattgagggttatagactggtatataatgttcttggtaagaagtacttgataaatagtattggttataactaacaaacctgaacaaactgctttacttacccacaaggaaaaagaaagtattggtctttggttattcactaaggcaagtggatgagtttttcatcagtaagcttaaattattagggctgtttgatcagtatccatatttcataagccttactgtataagaaactgtattacatctacttatgtttaaggatttttttaacacaataaaaatgttacctttgtcttgataagccagtctggcaggtgaatattgaattctgatggtgtgtgtttgagaaggtcctatagcacgttcaaagcgacgtctcctaacctgtgtcgtttctccatacactggataatttagagcaggccttcttccagggcacttctgtacaggttcctgtttataaatatactgctgaatgctgccacctgttatgtattagaatatcacatggaaaatgaaaattaattttaataccctcagaaaaggtggaaaacaacttttacaatgtataggaaacagttttgttctcatttttcatataatatattgatattaataatggctattagtcaagggtattataaaaataattattaaactgaaatacttgttgaatgaatagatgcagcaaattacatagttatatatttaatttcaattgaaagtgacaagtgctcagtttggcagcacatatactaaaactggaatgatacagagattagcatggcccttgtgcaaggatgacatgcacatttgtgaagcgaaagtaaatgacattctatcagtgacctgaaaactcaaatgaattgtgacttgcctgtgaagaaatgaaaataaaaattgagggcaataagaatactaccctcaatattgatttttttcactgaaaatatttgatttcagccattaaagatatcttttgacagtaaagtcaataataaatgaaaa

SEQ ID NO: 105 - protein, 2363 aa, Homo sapiens
MAAVLQQVLERTELNKLPKSVQNKLEKFLADQQSEIDGLKGRHEKFKVESEQQYFEIEKRLSHSQERLVNETRECQSLRLELEKLNNQLKALTEKNKELEIAQDRNIAIQSQFTRTKEELEAEKRDLIRTNERLSQELEYLTEDVKRLNEKLKESNTTKGELQLKLDELQASDVSVKYREKRLEQEKELLHSQNTWLNTELKTKTDELLALGREKGNEILELKCNLENKKEEVSRLEEQMNGLKTSNEHLQKHVEDLLTKLKEAKEQQASMEEKFHNELNAHIKLSNLYKSAADDSEAKSNELTRAVEELHKLLKEAGEANKAIQDHLLEVEQSKDQMEKEMLEKIGRLEKELENANDLLSATKRKGAILSEEELAAMSPTAAAVAKIVKPGMKLTELYNAYVETQDQLLLEKLENKRINKYLDEIVKEVEAKAPILKRQREEYERAQKAVASLSVKLEQAMKEIQRLQEDTDKANKQSSVLERDNRRMEIQVKDLSQQIRVLLMELEEARGNHVIRDEEVSSADISSSSEVISQHLVSYRNIEELQQQNQRLLVALRELGETREREEQETTSSKITELQLKLESALTELEQLRKSRQHQMQLVDSIVRQRDMYRILLSQTTGVAIPLHASSLDDVSLASTPKRPSTSQTVSTPAPVPVIESTEAIEAKAALKQLQEIFENYKKEKAENEKIQNEQLEKLQEQVTDLRSQNTKISTQLDFASKRYEMLQDNVEGYRREITSLHERNQKLTATTQKQEQIINTMTQDLRGANEKLAVAEVRAENLKKEKEMLKLSEVRLSQQRESLLAEQRGQNLLLTNLQTIQGILERSETETKQRLSSQIEKLEHEISHLKKKLENEVEQRHTLTRNLDVQLLDTKRQLDTETNLHLNTKELLKNAQKEIATLKQHLSNMEVQVASQSSQRTGKGQPSNKEDVDDLVSQLRQTEEQVNDLKERLKTSTSNVEQYQAMVTSLEESLNKEKQVTEEVRKNIEVRLKESAEFQTQLEKKLMEVEKEKQELQDDKRRAIESMEQQLSELKKTLSSVQNEVQEALQRASTALSNEQQARRDCQEQAKIAVEAQNKYERELMLHAADVEALQAAKEQVSKMASVRQHLEETTQKAESQLLECKASWEERERMLKDEVSKCVCRCEDLEKQNRLLHDQIEKLSDKVVASVKEGVQGPLNVSLSEEGKSQEQILEILRFIRREKEIAETRFEVAQVESLRYRQRVELLERELQELQDSLNAEREKVQVTAKTMAQHEELMKKTETMNVVMETNKMLREEKERLEQDLQQMQAKVRKLELDILPLQEANAELSEKSGMLQAEKKLLEEDVKRWKARNQHLVSQQKDPDTEEYRKLLSEKEVHTKRIQQLTEEIGRLKAEIARSNASLTNNQNLIQSLKEDLNKVRTEKETIQKDLDAKIIDIQEKVKTITQVKKIGRRYKTQYEELKAQQDKVMETSAQSSGDHQEQHVSVQEMQELKETLNQAETKSKSLESQVENLQKTLSEKETEARNLQEQTVQLQSELSRLRQDLQDRTTQEEQLRQQITEKEEKTRKAIVAAKSKIAHLAGVKDQLTKENEELKQRNGALDQQKDELDVRITALKSQYEGRISRLERELREHQERHLEQRDEPQEPSNKVPEQQRQITLKTTPASGERGIASTSDPPTANIKPTPVVSTPSKVTAAAMAGNKSTPRASIRPMVTPATVTNPTTTPTATVMPTTQVESQEAMQSEGPVEHVPVFGSTSGSVRSTSPNVQPSISQPILTVQQQTQATAFVQPTQQSHPQIEPANQELSSNIVEVVQSSPVERPSTSTAVFGTVSATPSSSLPKRTREEEEDSTIEASDQVSDDTVEMPLPKKLKSVTPVGTEEEVMAEESTDGEVETQVYNQDSQDSIGEGVTQGDYTPMEDSEETSQSLQIDLGPLQSDQQTTTSSQDGQGKGDDVIVIDSDDEEEDDDENDGEHEDYEEDEEDDDDDEDDTGMGDEGEDSNEGTGSADGNDGYEADDAEGGDGTDPGTETEESMGGGEGNHRAADSQNSGEGNTGAAESSFSQEVSREQQPSSASERQAPRAPQSPRRPPHPLPPRLTIHAPPQELGPPVQRIQMTRRQSVGRGLQLTPGIGGMQQHFFDDEDRTVPSTPTLVVPHRTDGFAEAIHSPQVAGVPRFRFGPPEDMPQTSSSHSDLGQLASQGGLGMYETPLFLAHEEESGGRSVPTTPLQVAAPVTVFTESTTSDASEHASQSVPMVTTSTGTLSTTNETATGDDGDEVFVEAESEGISSEAGLEIDSQQEEEPVQASDESDLPSTSQDPPSSSSVDTSSSQPKPFRRVRLQTTLRQGVRGRQFNRQRGVSHAMGGRGGINRGNIN

SEQ ID NO: 106 - DNA, 109 bp, Homo sapiens
ggagcagctacaagaccagattgctgagggcagctccatagaagaggaggagaaaacagataatgctaccttactgcgcctgttagaggaaggagaaaagatccaacac

SEQ ID NO: 107 - DNA, 14609 bp, Homo sapiens
agacagccagcgggaggtggagaaagcaggaggaggaggaggattaaagatggccaccaacagctgcgggaaacggcaacaacccctcactttccgggatggtccctgcgggtcggcccggccttgatggagagaagaaacccgaggagcgccgaggctgaggcggcggcggcggggacccagcgaggacgaggacgcggcggagcagggacgggggcaggagaagggaaaggcggcggcgtcgctgcccctgctgcctagcaccgctgcctggcccggcggaccggttcccatacctcgcggccgcagaatcgagctcgggccccggcccccggcccgcggcgcggggctcccgggccccgccgcggacgtcgcgccggtcgccccttccccgtagcccgtgcgccctcggcgcggagccccggcccgccgcggtcccgtctcctgggcctgtcccgcccgcgccctccgccggccctcaggtataatacttctccacgtctgcttcaggaagaaagtgcctgccattcttatcatttctaagcaggttcatgccagcccagaacagagaatcagctggagcccagatttcaagttttgagtaaaataccttcaagcgaatgggccctattgtgctcacacattcagaacctgttacccaaggaattccctaaagaattagaagtgcgtctcaccaaccagccaagatgaacatggtgaagaggatcatggggcggccgaggcaggaggagtgcagcccacaagacaacgccttaggactgatgcacctccgccggctcttcacggagttgtgccatcctccccggcacatgactcagaaggaacaagaagagaaactgtatatgatgctgccagtgtttaacagggtttttggaaatgctccgccgaatacaatgacagaaaaattttctgatcttctgcagttcacaacacaagtctcacgactaatggtgacagaaattcgaaggagagcatcaaacaaatccacagaggctgcaagtcgggccatagttcagttcctagagattaatcagagtgaagaagccagtagaggctggatgcttctaacgacaattaatttgttagcttcctctggtcagaaaaccgtggactgcatgacaacaatgtcagtgccttccaccctggttaaatgtttatatctgttttttgaccttccacatgtgcctgaggcagttggaggtgcacagaatgagctacctctagcagaacgtcgaggactactccagaaagtttttgtacagatcttagtgaaactgtgcagttttgtttcccctgcggaggagctggctcagaaagatgatctccagcttctattcagtgcaataacctcttggtgccctccctataacctgccttggagaaagagtgctggagaagtcctcatgaccatatctcgtcatggtcttagtgtcaatgtagtgaagtatattcatgagaaagagtgtttatctacatgtgttcagaatatgcagcaatcagatgacctgtctcccctagaaattgtcgaaatgtttgctgggctttcttgtttcctcaaagattccagcgatgtttcccaaacacttctggatgattttcggatatggcaaggatataattttctttgtgatctcttgcttagattggaacaagcaaaagaggcagaatccaaagatgccttgaaagatctggttaatctgataacttccctaacaacatatggtgtcagtgaactaaaaccagctggtattaccacaggggcaccctttttattgcctggatttgcagtacctcagcctgcaggcaaaggtcacagtgtgagaaacgtccaggcctttgcagttcttcagaatgcatttttaaaagcaaaaaccagcttccttgcccaaatcatccttgatgctatcacaaatatttacatggctgacaatgccaattacttcatcctagagtcacagcacacattgtcacagtttgcagagaagatttctaaactcccagaagtacaaaacaaatactttgagatgctggagtttgttgtttttagcttaaattatataccttgtaaagaacttattagtgtcagtatcctcttaaaatctagctcttcttatcactgtagcattattgcaatgaaaacacttcttaagtttacaagacatgactacatatttaaagacgtgttcagggaggttggccttttggaggtcatggtaaaccttttgcataaatatgctgccctgttgaaggatccaactcaggcactaaatgaacaaggggactcaagaaataatagttcagttgaagaccaaaaacacctggctttattggttatggagaccttgacagtgcttcttcaaggatcaaacacaaatgcaggaatttttcgagaatttggaggtgcaagatgtgcacataatatagtaaagtaccctcaatgccggcagcatgccttgatgactatccaacagctggtgctctccccaaatggggacgatgacatgggcactctcctggggctaatgcattcagccccaccgacggaattgcagttgaagactgatattttaagggccctcctgtcggtccttcgagaaagccatcgttcaagaacagtttttaggaaagttggaggatttgtgtacattacatccttgctcgttgctatggaaagatctttgagctgtccacccaagaatggctgggagaaagtgaaccagaatcaagtgtttgaacttcttcacactgtgttctgcacgttgactgcagcaatgcgctatgagccagccaactctcatttcttcaaaacagagattcagtatgagaagttggcagatgctgttcgatttcttggctgcttctcagacctaagaaaaataagcgccatgaatgtcttcccctcaaatacacagccatttcaaagacttttagaggaagatgtaatctcaatagaatcagtgtcacccacgttacggcactgcagtaaactttttatttatctttacaaagtagccacagattcttttgacagtcgtgcagaacagatccctccttgcctgacaagtgagtcttctctcccctctccttggggtacaccagctttgtccaggaaaaggcatgcatatcattctgtttcaactccccctgtttaccctcctaaaaatgttgccgacctgaaactacatgtgacaacttcatctctgcagagttctgatgcagtcatcattcatcctggagccatgcttgccatgctggacctactggcctctgttgggtcagtgacacagccagaacatgctttggatcttcaacttgccgtggcaaatattttacaatccctggtgcacacagaaaggaaccagcaagtcatgtgtgaagctggtcttcatgcacgactgctgcagaggtgcagtgctgcattggctgatgaggaccactcactgcacccgcccctgcagcggatgtttgaacgattagcctctcaggctctggaacccatggtgttgagggagtttttacgtttggcaagtcctttaaattgtggtgcctgggacaaaaaactgctaaaacaatatagggtccacaaaccaagttcactgagttatgaaccagaaatgagaagtagtatgatcacatctctggaaggtctgggtactgataatgtttttagcttacatgaagataaccattaccggataagcaagagcctggtaaaatctgcggaaggaagtactgtacccctgaccagggtgaagtgtctggtctccatgacaaccccacatgacatcagacttcatgggtcatcagttactccagcttttgttgaatttgacacatcacttgaagggtttggatgtctttttttgcccagtttggcccctcataatgctcctacaaataataccgtcacaacaggtcttattgatggggctgtggtcagtggcattggttctggtgaaagattcttccctcctccctccggcttaagttactctagctggttttgtattgaacattttagttctcctccaaataaccaccctgtcagacttcttactgttgtgcgccgagcaaattcttctgagcaacattacgtgtgccttgcaatagttctatcagcaaaagaccgatctctgattgtttccaccaaagaggaactcctccaaaattatgttgatgattttagtgaagagtcctcattttatgaaattctcccatgctgtgctcgctttcgatgtggagagcttatcattgagggacagtggcatcatttggtcctggtaatgagcaaaggcatgttgaaaaacagtactgcagccctttatattgatggacagcttgttaacactgtaaagcttcattatgtccacagtactccagggggttcaggttcggcaaatccaccagtggtgagcacggtctatgcctacattggtactccacctgcccaacgccaaattgcctcattggtttggcgcctgggacccacacattttctagaagaagttttaccttcttcaaatgttactaccatttatgaacttggaccaaattatgttggaagctttcaggctgtatgtatgccatgtaaagatgcaaaatccgaaggggtggtgccatcccctgtgtcattagtaccagaggagaaagtgtcatttggcctctatgcactctctgtgtcgtctctaacagtggcaagaatccggaaagtgtataacaaattggatagcaaagccattgctaagcagttaggcatttcctcacatgagaatgccactcctgtgaagttgatacacaattcagcaggacatcttaatggatctgcacggacaattggggccgctctgattggatacttgggagtaagaacatttgtccctaagcctgttgccactactttgcagtacgttggtggagctgcagccatcctgggcctggtggccatggcctctgatgtggaagggttatatgcagcagtcaaggccctggtttgtgtggtcaagagtaacccactagccagcaaagaaatggaaagaatcaagggctaccagttgctggcaatgttgcttaagaagaaacgttcccttcttaacagccacatcctccatctaactttttctttggtgggaactgttgatagtggacatgagacctccattattccaaattcaactgctttccaggacctcctctgtgattttgaagtctggctccatgcaccatatgaacttcatctttccttatttgaacactttattgaactgctcacagagtccagtgaagcctcaaagaatgccaaattaatgagagaattccagttaatcccaaagctgctcctgactcttcgagatatgtctttatcccagcctactattgctgctattagtaatgtcctgagcttcttactgcaaggttttcctagcagcaatgatctgctcagatttgggcagtttatttcttctactttgccaacctttgcggtttgtgagaaatttgtagtaatggaaataaataatgaagagaagcttgacactggaactgaagaggagtttggaggtcttgtatcagctaatcttatacttttgaggaacagacttctggatatcttgctaaaactaatttatacatctaaagaaaagacaagcattaatttgcaagcttgtgaagaactggtgaagacactgggttttgactggatcatgatgtttatggaggaacacttacattccaccacagttacagcagccatgaggattcttgttgtcctactaagtaatcagtctattctcatcaagtttaaagaaggactcagtggtggaggatggcttgaacagacagattctgtcttaactaataagattggaactgtattaggattcaacgtgggcagaagtgctggtgggagatcgacggtcagggagattaaccgagatgcttgtcattttcctggttttccagtccttcagtcattccttcctaaacacactaatgtccctgccctctattttctcctcatggccttgtttctgcagcagccagttagtgagctgcctgagaacctgcaggtcagtgtgcctgtcatcagctgccggagtaagcagggttgccagtttgatttggattccatttggacattcatctttggagttcctgcctccagcggaactgtggtctcttctatccataacgtatgcacagaagctgtttttttattattgggaatgctccgcagcatgctgacttcaccttggcaatcagaagaagagggatcttggctccgagaatatcctgtgaccctgatgcagttcttcagatatttgtatcacaacgtgccagaccttgcctccatgtggatgagccctgacttcctgtgtgcattagcagccaccgtcttccccttcaatattcgcccttactcagagatggtgactgaccttgatgatgaagttggatctccagcagaagagtttaaagcgtttgcagcagacacagggatgaacaggagccaatcagagtactgcaatgtgggcaccaagacatatctgaccaatcacccggctaaaaagttcgtttttgacttcatgcgggtcttaatcatagacaacctctgtctcactcctgccagcaagcaaactccactaattgatcttttgttggaggcttcccctgaaaggtctacaagaactcagcaaaaagaatttcaaacttacattttggatagcgtgatggaccatttgcttgcagctgatgtgttattaggggaagatgcatctctgcctattaccagtggaggaagctaccaggtattggtgaacaatgtgttttatttcacacagcgtgtggtggacaagctttggcaaggcatgttcaacaaagaatctaaacttcttatagattttataattcaactaattgcacagtcaaagagaagatcacagggattgtcactggatgcagtgtatcattgcctcaataggaccatcttgtaccagttctcacgggcacacaaaaccgttcctcagcaagtagctctgcttgattcactcagggtcctcactgtaaacagaaacttgatcctgggacctgggaaccatgaccaagaattcattagctgtctggcccactgcttgataaatctacatgttggaagcaacgtggatggatttggactggaagcagaagcccgcatgaccacatggcacattatgatcccctcggacattgaaccagatggtagttacagccaagatattagtgaagggcgtcagcttctcataaaagctgtcaacagagtttggactgaactgatacatagtaagaaacaagtcttagaggaacttttcaaagtaactctacctgtgaatgaaaggggccacgtggacatagctacagcaaggccactcattgaagaagctgccctgaagtgctggcagaatcatttggcccatgaaaagaaatgcataagtcgaggagaagctttagcgcccaccacacagtccaaattatcccgtgtcagcagtggctttggtctttccaagttaacaggatcaagaaggaatcgaaaagaaagtggtcttaataaacacagtctttccacccaggagatttcgcagtggatgtttactcacattgctgttgttcgtgacttagtagatacacaatataaagaatatcaggagcgtcagcagaatgccctgaagtacgtgacagaagagtggtgtcagatcgagtgcgagctgttgagggagcgggggctgtggggccctcccatcggctcccacctcgacaagtggatgctggagatgacagaagggccctgcaggatgaggaaaaagatggtgcgaaatgatatgttttataaccattacccttacgtgccagaaactgagcaagagacaaatgtggcgtctgagatcccaagtaaacagcctgagacacccgatgatattcctcaaaagaaacctgctcgatatagaagagccgtaagttatgacagtaaagagtactacatgcgactggcctctggcaatcccgccattgtccaagacgccattgtggagagttcagaaggtgaagctgctcagcaagaaccagagcatggggaagacactattgctaaagtcaaaggtttggtcaagcctcctctaaaacgctcccgatctgcacctgatggaggagatgaggagaaccaggagcagctacaagaccagattgctgagggcagctccatagaagaggaggagaaaacagataatgctaccttactgcgcctgttagaggaaggagaaaagatccaacacatgtaccgctgtgctcgagtccagggcctagataccagtgaggggctccttctttttggtaaagagcatttttatgtgattgatggatttaccatgacagcaaccagggaaataagagatattgaaaccttacctccaaatatgcatgagcctattattcctagaggagccaggcaaggccctagtcaactcaagagaacatgcagcatttttgcatatgaagatatcaaggaagttcataaaaggagatatctcctgcagcctattgctgtggaagttttctctggagatggacggaattacctccttgcttttcagaaaggaatcagaaacaaagtctatcaaaggtttttggctgtagtgccatctctaacggacagttcagaatctgtatctgggcaacgaccaaacacgagtgtggagcagggatctgggttacttagcactttggttggagagaagtctgtgactcagagatgggagagaggtgaaatcagcaacttccaatatttgatgcatttgaacactttggctggcagatcatataatgatctcatgcagtatcctgtcttcccctggatccttgcagattatgactcagaggaggtggatcttactaatcccaagacgtttagaaacctggctaagccaatgggagcacaaacagatgaacgattagctcagtataagaagcggtataaagactgggaggatcctaatggagaaactcctgcataccactatgggacccactattcatctgcaatgattgtggcctcataccttgtaaggatggagcctttcacacagatattcttaaggctacagggtggccactttgacctggctgaccggatgtttcacagtgtgcgcgaggcctggtattcagcgtcaaagcacaatatggcagatgtaaaagaacttatcccagagttcttttatttaccagaattcctgttcaattccaacaactttgatctaggctgtaaacaaaatggcaccaagcttggagatgttatccttccaccctgggcaaaaggggacccacgagaattcatcagagtccatcgtgaggctttggagtgtgattacgtgagtgcccatctacatgagtggattgacttaatcttcggttataaacagcaaggccctgctgcagtagaagctgtaaatgtcttccatcatcttttttatgagggtcaagtggatatctacaacatcaatgacccactaaaggagacagccacaattgggttcattaataacttcggtcagatccctaaacagttatttaaaaaacctcatccaccaaagcgagtgagaagtcgactcaatggagacaatgcaggaatctctgtcctaccaggatctacaagtgacaagatcttttttcatcatctagacaacttgaggccttctctaacacctgtaaaagaactcaaagaacctgtaggacaaatcgtatgtacagataaaggtattcttgcggtggaacagaataaggttcttatcccaccaacctggaataaaacttttgcttggggctatgcagacctcagttgcagactgggaacctatgagtcagacaaggccatgactgtttatgaatgcttgtctgagtggggccagattctctgtgcaatctgccccaaccccaagctggtcatcacgggtggaacaagcacggttgtgtgtgtgtgggagatgggcacctccaaagaaaaggccaagaccgtcaccctcaaacaggccttactgggccacactgataccgtcacctgcgccacagcatcattagcctatcacataattgtcagtgggtcccgtgatcgaacctgtatcatttgggatttgaacaaactgtcatttctaacccagcttcgagggcatcgagctccagtttctgctctttgtatcaatgaattaacaggggacattgtgtcctgcgctggcacatatatccatgtgtggagcatcaatgggaaccctatcgtgagtgtcaacacgttcacaggtaggagccagcagatcatctgctgctgcatgtcggagatgaacgaatgggacacgcagaacgtcatagtgacaggacactcagatggagtggttcggttttggagaatggaatttttgcaagttcctgaaacaccagctcctgagcctgctgaagtcctagaaatgcaggaagactgtccagaagcacaaatagggcaggaagcccaagacgaggacagcagtgattcagaagcagatgagcagagcatcagccaggaccctaaggacactccaagccaacccagcagcaccagccacaggccccgggcagcctcctgccgcgcaacagccgcctggtgtactgacagtggctctgacgactccagacgctggtccgaccagctcagtctagatgagaaagacggcttcatatttgtgaactattcagagggccagaccagagcccatctgcagggcccccttagccacccccaccccaatcccattgaggtgcggaattacagcagattgaaacctgggtaccgatgggaacggcagctggtgttcaggagtaagctgactatgcacacagcctttgatcgaaaggacaatgcacacccagctgaggtcactgccttgggcatctccaaggatcacagtaggatcctcgttggtgacagtcgaggccgagttttcagctggtctgtgagtgaccagccaggccgttctgctgctgatcactgggtgaaggatgaaggtggtgacagctgctcaggctgctcggtgaggttttcactcacagaaagacgacaccattgcaggaactgtggtcagctcttctgccagaagtgcagtcgctttcaatctgaaatcaaacgcttgaaaatctcatccccggtgcgtgtttgtcagaactgttattataacttacagcatgagagaggttcagaagatgggcctcgaaattgttgaagattcaacaagctgagtggagaccatggtctgtagaccccttcccgattctcctgtcccagcttggaaggcattgaaaacagtctccgtttacacatctcttcataccacgtgtttgaagtgttaaaattcaaagggatcattgaataaaacgggtgtagagtacaggaatggggcagacgcgattcaggtgaacagcacaagaagaatatgaggtggttcctaggagcaacactttcgacctccagttctccctgatgacagtagctgtctccaagagaaaaatcctcacttattaactctcttttcttgcatctcatttttatagagctactcatccttatttggaaaaaccaacaacaaaaaaggcttttagaaaatggttgtaaatctgacttctttgcaagtaactatgtatattgtaaatagatataaaaggccttttttctaaataaggacttaactgcctgtaacatgaaacttcaaactaaaccactaactcaatgaactacttatggtttgtctgacatccctcacttaccaattaattataaatatgtttttttaaatccccaaagacattatctgtggtctttttttcctttcaagctcagcctgtgtgcctgatgtcatttctttcaagttgcccacagtatctccacttaaactaggctagtaaccaaaataatgtggaccttctttaggaaacagtgtgggagaataggagtccagccgtaagataaactggaaatatttgggcgtcttgtacctggctacgcaccacctcagtgttgttcctacataaacagggccccttttaaacttgtatgtggactgctgtttggtcaaagaataccttcttagcattgcagaaaggtggtcagatgaccagtgtagtgcaggaaacagccctgtctcaactaatggaaatatatttgcatgtaacccaaaattagcttatcttgcatagaacataataagtatgtgtctttggtgacactaatgttctactatagcttattttcaaacaaggggtaaaaaaaggaaagaaagaagtgtacagaattaacatataaactttgttgtaaaactgaatcatgtcagaactgcttaaaattaacctttaccatttaatgtcatctacctgaaaacagtgagatttatactgtatcaatgtctatttttttgtttttgctatgaatataattacagtattttaatatttagttatttaatttgttctactagttggatacagaacacacaaatccagggggattaaagctggaaggggctaagagattagtttacagagaaaaggcttggtggtgggatttttttaaatgtgtgttatgtacatatatatatatatataatatatattaaaaatgaaacaattaatctagattttaacattttcagaaacttagtgataacattatgaacaattctaaaagccctgtgatttgaaaaatatagaatcattaatggcccaagataggccttcacaccttcacaggtgcgaaaggaaaggccttcacaccctcacagaggcatcatgcaaaggacagcggctttggcttttccaattttccatctttaggccctggtgagaggcacacttatgcactaaaatgcacatatatgcacatgcattcaaaaataggcatttggtacaatggtgatcttgtacctgatgggctgaaaccagcttaagaacaaatttgttcttcctgatatgataactaggtctccaagagaaaatagaaaggctgctttagtgccttacgcttactaaatttaaatctttatttacctgggtttgagcctacagtctatttatgattacatatcaaaattgattaaaacacttccatttctaaaagttcaaatatacttgttaataaaaggattatcggcattaatactttaatttaaagaaaagttgtgttctgttttcctttctgtgtcttactccccccacactctccctcccccatcaccatcttcaattctaataaataatgctgatgttcaacagttgcagaaattgtgctattatgtaactgtgggccttgcccctgtctggccctctagatgatttgtagcagtgttattctacactttttaaaagaagcgtcctccttttgtccatgaatcatgtttaccccatacccagtggcagaggtgttctttaaagacttgaatatatgaatgtgtgtgtgtagttacttaaaggttattcctctttgtaataggaaactatatgggatgaacacttttaaactttccgacacaacttccattactaactttctaacagaacttccataactagaaggtggaaaccaaaaccctcatggtagtatttcctctggcagctggtgctgtgggcaactgttttgttcaatcgggtttcttttctttttgcctctaatgcagaaatcaacagaatcactcacacatacaagtacactcacatacataaactaattatttctctggatatctttctgtgttccatgtaaatttatttaccaacatctattgtcaacatgtacatctaccttagtatggtctgcattctttttctgagagtacctcatagggctcctgcctgatctttgtagtttgttcattcatccatccacctgttcatttgttcatccatgtattctaacatttctatgtagtgtgcaactctaatgtcatgcttttgaagaagagaatagctgcccatagcagccatccgtctggataatagcaaaacactctagataagttattttgcactttcttatgtataaagttggtagaaacttatttttgctttgtatcatttaaatacattttgttttggtaaatgaactgtgtataaaatatttatgccgttaaaactgtttttagaaagtatttttaatttcagcaagtttggttacttgttgcatgactcttaacacagctgactttttgtgtcagtgcaatgtatattttttgtcctgttattaacttgtaagccctagtaatggccaattatttgtacagcaacagaagtaaattgaagatactggctaagactggattgattgtggacttttatactatattgcagaaaccaatatctgtttcttggtggttatgtaaaagacctgaagaattactatctagtgtgcagtctgtgatatctgaatgttcattgtatatttgtctctgatgcaaaaaggtagagtaacacaattacaatacatgattaaatgcaatagtccaggtacttaagtaatttttttttcatttcaaataaatacctatttaccaccaaaa

SEQ ID NO: 108 - protein, 3526 aa, Homo sapiens
MNMVKRIMGRPRQEECSPQDNALGLMHLRRLFTELCHPPRHMTQKEQEEKLYMMLPVFNRVFGNAPPNTMTEKFSDLLQFTTQVSRLMVTEIRRRASNKSTEAASRAIVQFLEINQSEEASRGWMLLTTINLLASSGQKTVDCMTTMSVPSTLVKCLYLFFDLPHVPEAVGGAQNELPLAERRGLLQKVFVQILVKLCSFVSPAEELAQKDDLQLLFSAITSWCPPYNLPWRKSAGEVLMTISRHGLSVNVVKYIHEKECLSTCVQNMQQSDDLSPLEIVEMFAGLSCFLKDSSDVSQTLLDDFRIWQGYNFLCDLLLRLEQAKEAESKDALKDLVNLITSLTTYGVSELKPAGITTGAPFLLPGFAVPQPAGKGHSVRNVQAFAVLQNAFLKAKTSFLAQIILDAITNIYMADNANYFILESQHTLSQFAEKISKLPEVQNKYFEMLEFVVFSLNYIPCKELISVSILLKSSSSYHCSIIAMKTLLKFTRHDYIFKDVFREVGLLEVMVNLLHKYAALLKDPTQALNEQGDSRNNSSVEDQKHLALLVMETLTVLLQGSNTNAGIFREFGGARCAHNIVKYPQCRQHALMTIQQLVLSPNGDDDMGTLLGLMHSAPPTELQLKTDILRALLSVLRESHRSRTVFRKVGGFVYITSLLVAMERSLSCPPKNGWEKVNQNQVFELLHTVFCTLTAAMRYEPANSHFFKTEIQYEKLADAVRFLGCFSDLRKISAMNVFPSNTQPFQRLLEEDVISIESVSPTLRHCSKLFIYLYKVATDSFDSRAEQIPPCLTSESSLPSPWGTPALSRKRHAYHSVSTPPVYPPKNVADLKLHVTTSSLQSSDAVIIHPGAMLAMLDLLASVGSVTQPEHALDLQLAVANILQSLVHTERNQQVMCEAGLHARLLQRCSAALADEDHSLHPPLQRMFERLASQALEPMVLREFLRLASPLNCGAWDKKLLKQYRVHKPSSLSYEPEMRSSMITSLEGLGTDNVFSLHEDNHYRISKSLVKSAEGSTVPLTRVKCLVSMTTPHDIRLHGSSVTPAFVEFDTSLEGFGCLFLPSLAPHNAPTNNTVTTGLIDGAVVSGIGSGERFFPPPSGLSYSSWFCIEHFSSPPNNHPVRLLTVVRRANSSEQHYVCLAIVLSAKDRSLIVSTKEELLQNYVDDFSEESSFYEILPCCARFRCGELIIEGQWHHLVLVMSKGMLKNSTAALYIDGQLVNTVKLHYVHSTPGGSGSANPPVVSTVYAYIGTPPAQRQIASLVWRLGPTHFLEEVLPSSNVTTIYELGPNYVGSFQAVCMPCKDAKSEGVVPSPVSLVPEEKVSFGLYALSVSSLTVARIRKVYNKLDSKAIAKQLGISSHENATPVKLIHNSAGHLNGSARTIGAALIGYLGVRTFVPKPVATTLQYVGGAAAILGLVAMASDVEGLYAAVKALVCVVKSNPLASKEMERIKGYQLLAMLLKKKRSLLNSHILHLTFSLVGTVDSGHETSIIPNSTAFQDLLCDFEVWLHAPYELHLSLFEHFIELLTESSEASKNAKLMREFQLIPKLLLTLRDMSLSQPTIAAISNVLSFLLQGFPSSNDLLRFGQFISSTLPTFAVCEKFVVMEINNEEKLDTGTEEEFGGLVSANLILLRNRLLDILLKLIYTSKEKTSINLQACEELVKTLGFDWIMMFMEEHLHSTTVTAAMRILVVLLSNQSILIKFKEGLSGGGWLEQTDSVLTNKIGTVLGFNVGRSAGGRSTVREINRDACHFPGFPVLQSFLPKHTNVPALYFLLMALFLQQPVSELPENLQVSVPVISCRSKQGCQFDLDSIWTFIFGVPASSGTVVSSIHNVCTEAVFLLLGMLRSMLTSPWQSEEEGSWLREYPVTLMQFFRYLYHNVPDLASMWMSPDFLCALAATVFPFNIRPYSEMVTDLDDEVGSPAEEFKAFAADTGMNRSQSEYCNVGTKTYLTNHPAKKFVFDFMRVLIIDNLCLTPASKQTPLIDLLLEASPERSTRTQQKEFQTYILDSVMDHLLAADVLLGEDASLPITSGGSYQVLVNNVFYFTQRVVDKLWQGMFNKESKLLIDFIIQLIAQSKRRSQGLSLDAVYHCLNRTILYQFSRAHKTVPQQVALLDSLRVLTVNRNLILGPGNHDQEFISCLAHCLINLHVGSNVDGFGLEAEARMTTWHIMIPSDIEPDGSYSQDISEGRQLLIKAVNRVWTELIHSKKQVLEELFKVTLPVNERGHVDIATARPLIEEAALKCWQNHLAHEKKCISRGEALAPTTQSKLSRVSSGFGLSKLTGSRRNRKESGLNKHSLSTQEISQWMFTHIAVVRDLVDTQYKEYQERQQNALKYVTEEWCQIECELLRERGLWGPPIGSHLDKWMLEMTEGPCRMRKKMVRNDMFYNHYPYVPETEQETNVASEIPSKQPETPDDIPQKKPARYRRAVSYDSKEYYMRLASGNPAIVQDAIVESSEGEAAQQEPEHGEDTIAKVKGLVKPPLKRSRSAPDGGDEENQEQLQDQIAEGSSIEEEEKTDNATLLRLLEEGEKIQHMYRCARVQGLDTSEGLLLFGKEHFYVIDGFTMTATREIRDIETLPPNMHEPIIPRGARQGPSQLKRTCSIFAYEDIKEVHKRRYLLQPIAVEVFSGDGRNYLLAFQKGIRNKVYQRFLAVVPSLTDSSESVSGQRPNTSVEQGSGLLSTLVGEKSVTQRWERGEISNFQYLMHLNTLAGRSYNDLMQYPVFPWILADYDSEEVDLTNPKTFRNLAKPMGAQTDERLAQYKKRYKDWEDPNGETPAYHYGTHYSSAMIVASYLVRMEPFTQIFLRLQGGHFDLADRMFHSVREAWYSASKHNMADVKELIPEFFYLPEFLFNSNNFDLGCKQNGTKLGDVILPPWAKGDPREFIRVHREALECDYVSAHLHEWIDLIFGYKQQGPAAVEAVNVFHHLFYEGQVDIYNINDPLKETATIGFINNFGQIPKQLFKKPHPPKRVRSRLNGDNAGISVLPGSTSDKIFFHHLDNLRPSLTPVKELKEPVGQIVCTDKGILAVEQNKVLIPPTWNKTFAWGYADLSCRLGTYESDKAMTVYECLSEWGQILCAICPNPKLVITGGTSTVVCVWEMGTSKEKAKTVTLKQALLGHTDTVTCATASLAYHIIVSGSRDRTCIIWDLNKLSFLTQLRGHRAPVSALCINELTGDIVSCAGTYIHVWSINGNPIVSVNTFTGRSQQIICCCMSEMNEWDTQNVIVTGHSDGVVRFWRMEFLQVPETPAPEPAEVLEMQEDCPEAQIGQEAQDEDSSDSEADEQSISQDPKDTPSQPSSTSHRPRAASCRATAAWCTDSGSDDSRRWSDQLSLDEKDGFIFVNYSEGQTRAHLQGPLSHPHPNPIEVRNYSRLKPGYRWERQLVFRSKLTMHTAFDRKDNAHPAEVTALGISKDHSRILVGDSRGRVFSWSVSDQPGRSAADHWVKDEGGDSCSGCSVRFSLTERRHHCRNCGQLFCQKCSRFQSEIKRLKISSPVRVCQNCYYNLQHERGSEDGPRNC

SEQ ID NO: 109 - DNA, 109 bp, Homo sapiens
ggccctcatcaacgcgggagacttccacggcctgcaggtgctggtgggtgtggtgaaggatgagggctcgtattttctggtttacggggccccaggcttcagcaaagac

SEQ ID NO: 110 - DNA, 2172 bp, Homo sapiens
gtcagagtcggctcagcctgcgccggggaacatcggccgcctccagctcccggcgcggcccggcccggcccggctcggccgcctcagacgccgcctgccctgcagccatgaggcccccgcagtgtctgctgcacacgccttccctggcttccccactccttctcctcctcctctggctcctgggtggaggagtgggggctgagggccgggaggatgcagagctgctggtgacggtgcgtgggggccggctgcggggcattcgcctgaagacccccgggggccctgtctctgctttcctgggcatcccctttgcggagccacccatgggaccccgtcgctttctgccaccggagcccaagcagccttggtcaggggtggtagacgctacaaccttccagagtgtctgctaccaatatgtggacaccctatacccaggttttgagggcaccgagatgtggaaccccaaccgtgagctgagcgaggactgcctgtacctcaacgtgtggacaccatacccccggcctacatcccccacccctgtcctcgtctggatctatgggggtggcttctacagtggggcctcctccttggacgtgtacgatggccgcttcttggtacaggccgagaggactgtgctggtgtccatgaactaccgggtgggagcctttggcttcctggccctgccggggagccgagaggccccgggcaatgtgggtctcctggatcagaggctggccctgcagtgggtgcaggagaacgtggcagccttcgggggtgacccgacatcagtgacgctgtttggggagagcgcgggagccgcctcggtgggcatgcacctgctgtccccgcccagccggggcctgttccacagggccgtgctgcagagcggtgcccccaatggaccctgggccacggtgggcatgggagaggcccgtcgcagggccacgcagctggcccaccttgtgggctgtcctccaggcggcactggtgggaatgacacagagctggtagcctgccttcggacacgaccagcgcaggtcctggtgaaccacgaatggcacgtgctgcctcaagaaagcgtcttccggttctccttcgtgcctgtggtagatggagacttcctcagtgacaccccagaggccctcatcaacgcgggagacttccacggcctgcaggtgctggtgggtgtggtgaaggatgagggctcgtattttctggtttacggggccccaggcttcagcaaagacaacgagtctctcatcagccgggccgagttcctggccggggtgcgggtcggggttccccaggtaagtgacctggcagccgaggctgtggtcctgcattacacagactggctgcatcccgaggacccggcacgcctgagggaggccctgagcgatgtggtgggcgaccacaatgtcgtgtgccccgtggcccagctggctgggcgactggctgcccagggtgcccgggtctacgcctacgtctttgaacaccgtgcttccacgctctcctggcccctgtggatgggggtgccccacggctacgagatcgagttcatctttgggatccccctggacccctctcgaaactacacggcagaggagaaaatcttcgcccagcgactgatgcgatactgggccaactttgcccgcacaggggatcccaatgagccccgagaccccaaggccccacaatggcccccgtacacggcgggggctcagcagtacgttagtctggacctgcggccgctggaggtgcggcgggggctgcgcgcccaggcctgcgccttctggaaccgcttcctccccaaattgctcagcgccaccgacacgctcgacgaggcggagcgccagtggaaggccgagttccaccgctggagctcctacatggtgcactggaagaaccagttcgaccactacagcaagcaggatcgctgctcagacctgtgaccccggcgggacccccatgtcctccgctccgcccggccccctagctgtatatactatttatttcagggctgggctataacacagacgagccccagactctgcccatccccaccccaccccgacgtcccccggggctcccggtcctctgcatgtctcaggctgagctccctcccccgcggtgccttcgcccctctgggctgccaataaactgttacagcca

SEQ ID NO: 111 - protein, 614 aa, Homo sapiens
MRPPQCLLHTPSLASPLLLLLLWLLGGGVGAEGREDAELLVTVRGGRLRGIRLKTPGGPVSAFLGIPFAEPPMGPRRFLPPEPKQPWSGVVDATTFQSVCYQYVDTLYPGFEGTEMWNPNRELSEDCLYLNVWTPYPRPTSPTPVLVWIYGGGFYSGASSLDVYDGRFLVQAERTVLVSMNYRVGAFGFLALPGSREAPGNVGLLDQRLALQWVQENVAAFGGDPTSVTLFGESAGAASVGMHLLSPPSRGLFHRAVLQSGAPNGPWATVGMGEARRRATQLAHLVGCPPGGTGGNDTELVACLRTRPAQVLVNHEWHVLPQESVFRFSFVPVVDGDFLSDTPEALINAGDFHGLQVLVGVVKDEGSYFLVYGAPGFSKDNESLISRAEFLAGVRVGVPQVSDLAAEAVVLHYTDWLHPEDPARLREALSDVVGDHNVVCPVAQLAGRLAAQGARVYAYVFEHRASTLSWPLWMGVPHGYEIEFIFGIPLDPSRNYTAEEKIFAQRLMRYWANFARTGDPNEPRDPKAPQWPPYTAGAQQYVSLDLRPLEVRRGLRAQACAFWNRFLPKLLSATDTLDEAERQWKAEFHRWSSYMVHWKNQFDHYSKQDRCSDL

SEQ ID NO: 112 - DNA, 100 bp, Homo sapiens
gctatgatccacaaaaacaacttattattgaagatccctattatgggaatgactctgactttgagacggtgtaccagcagtgtgtcaggtgctgcagagc

SEQ ID NO: 113 - DNA, 1597 bp, Homo sapiens
actgcgcaggcgcgcggggcaagagggtggcagtgcgcctgcgccgcgtcggcgtgcggaacgccgcggtgtctcggcgcctctgcgcgcgggaagatggcggaacaggctaccaagtccgtgctgtttgtgtgtctgggtaacatttgtcgatcacccattgcagaagcagttttcaggaaacttgtaaccgatcaaaacatctcagagaattggagggtagacagcgcggcaacttccggtgggtcattgacagcggtgctgtttctgactggaacgtgggccggtccccagacccaagagctgtgagctgcctaagaaatcatggcattcacacagcccataaagcaagacagattaccaaagaagattttgccacatttgattatatactatgtatggatgaaagcaatctgagagatttgaatagaaaaagtaatcaagttaaaacctgcaaagctaaaattgaactacttgggagctatgatccacaaaaacaacttattattgaagatccctattatgggaatgactctgactttgagacggtgtaccagcagtgtgtcaggtgctgcagagcgttcttggagaaggcccactgaggcaggttcgtgccctgctgcggccagcctgactagaccccaccctgaggtcctgcatttctcagtcggtgtgtaatcacgttccagggcccaaagcccagctctttgttcagttgacttactgtttcttaccttaaaaagtaattgtagatggaaatcagttgtgtttggcaggagaatcaataaaaatctttgattcagacagcttatggggtattttaagcattcttagactagttgaacatctcactttgccccagttacaaaaatagtagaacaagcaacataaaacaatgaaggaaaacctcacttgaaggcccaggtcaacatctaagcctgttgagacttagataatcgagtctacctcttcagtaggtttgtgtggatggcctggagggcaggtgccctctgctccccagtgctacctctctcttccctagggccttttgtggattgacagtagtcccctccgtaggagctcacagtctagattagaagtgttttaatttctacacacccatagtgcacacttgtatattgaaaagatagggaagagagaaacatttatggaatcagtcgttggcaccttcaatacttcatgatttttgtcgagtttacttcatgaggaggtcagcccattggctcccatctgaaccactttgcctctgaaacttaattacatccagaaagaaggacacttgtatgctagtctatggtcagttgaggaatatgactgtttttatatgcacatgtaacccaaatgtccaatataaattggcttattttttaaaataattttaaaagttgggaaaagtgttattatttggcatgcttaaatattgaataagtattcttcatcagcatttaataaatgtataggcagatgtaaggtaatttctgtgtattttgagataatgtcaaaatcatgaatatttcaaaataaactggggagttataaaaatacaactagagatataaaaaaaaaaaaaaaaaaa

SEQ ID NO: 114 - protein, 158 aa, Homo sapiens
MAEQATKSVLFVCLGNICRSPIAEAVFRKLVTDQNISENWVIDSGAVSDWNVGRSPDPRAVSCLRNHGIHTAHKARQITKEDFATFDYILCMDESNLRDLNRKSNQVKTCKAKIELLGSYDPQKQLIIEDPYYGNDSDFETVYQQCVRCCRAFLEKAH

SEQ ID NO: 115 - DNA, 106 bp, Homo sapiens
actggccgaagatctttgtctcgctcgatctcacagtcctccactgacagctacagttcagctgcatcctacacagatagctctgatgatgaggtttctccccgag

SEQ ID NO: 116 - DNA, 3944 bp, Homo sapiens
gctttgcgtgcgtgtttgcgtacagcggaggtggcggcgcgggcaggtcggagctcggagctgctgcttctggttctcttgtggccgccgtcgctgtccggctgccttgggctgccgaacagacaaggcgtgggccacagcacctcagaagccgacgcagctcgacgcaggggccggcaggagggtgggcgatcgcgtgtcggagggcgccgcgcgggcaggcgggcgggcgccagagggggaaagaggcgggggcggcgggtcagccgctggccgggccggccggggaatgtcgatgcctgacgcgatgccgctgcccggggtcggggaggagctgaagcaggccaaggagatcgaggacgccgagaagtactccttcatggccaccgtcaccaaggcgcccaagaagcaaatccagtttgctgatgacatgcaggagttcaccaaattccccaccaaaactggccgaagatctttgtctcgctcgatctcacagtcctccactgacagctacagttcagctgcatcctacacagatagctctgatgatgaggtttctccccgagagaagcagcaaaccaactccaagggcagcagcaatttctgtgtgaagaacatcaagcaggcagaatttggacgccgggagattgagattgcagagcaagacatgtctgctctgatttcactcaggaaacgtgctcagggggagaagcccttggctggtgctaaaatagtgggctgtacacacatcacagcccagacagcggtgttgattgagacactctgtgccctgggggctcagtgccgctggtctgcttgtaacatctactcaactcagaatgaagtagctgcagcactggctgaggctggagttgcagtgttcgcttggaagggcgagtcagaagatgacttctggtggtgtattgaccgctgtgtgaacatggatgggtggcaggccaacatgatcctggatgatgggggagacttaacccactgggtttataagaagtatccaaacgtgtttaagaagatccgaggcattgtggaagagagcgtgactggtgttcacaggctgtatcagctctccaaagctgggaagctctgtgttccggccatgaacgtcaatgattctgttaccaaacagaagtttgataacttgtactgctgccgagaatccattttggatggcctgaagaggaccacagatgtgatgtttggtgggaaacaagtggtggtgtgtggctatggtgaggtaggcaagggctgctgtgctgctctcaaagctcttggagcaattgtctacattaccgaaatcgaccccatctgtgctctgcaggcctgcatggatgggttcagggtggtaaagctaaatgaagtcatccggcaagtcgatgtcgtaataacttgcacaggaaataagaatgtagtgacacgggagcacttggatcgcatgaaaaacagttgtatcgtatgcaatatgggccactccaacacagaaatcgatgtgaccagcctccgcactccggagctgacgtgggagcgagtacgttctcaggtggaccatgtcatctggccagatggcaaacgagttgtcctcctggcagagggtcgtctactcaatttgagctgctccacagttcccacctttgttctgtccatcacagccacaacacaggctttggcactgatagaactctataatgcacccgaggggcgatacaagcaggatgtgtacttgcttcctaagaaaatggatgaatacgttgccagcttgcatctgccatcatttgatgcccaccttacagagctgacagatgaccaagcaaaatatctgggactcaacaaaaatgggccattcaaacctaattattacagatactaatggaccatactaccaaggaccagtccacctgaaccacacactctaaagaaatattttttaagataacttttattttcttcttactcctttcctcttgatttttttcctataatttcattcttgttttttcatctcattatccaagttctgcagaccacacaggaacttgcttcatggctctttagatgaaatagaagttcagggttcctcactctagtcactaaagaaggattttactctcccagcccagaaaggtgattctttctttaccatttctggggactttagtcttaattaggtaccttattaacaggaaatgctaaggtaccttctctgtggaacaatctgcaatgtctaaatcgccttaaaagagcccatttcttagctgctgaaatcagtgctctttcacttcttcagagaagcagggatggtacctacccggcaggtaggttagatgtgggtggtgcatgttaatttcccttagaagttccaagccctgtttcctgcgtaaaggtggtatgtccagttcagagatgtgtataatgagcatggcttgttaagatcaggaggcccacttggatttatagtatagcccttcctccactcccaccagacttgctcatttttcgagtttttaactagactacactctattgagtttaattttgtcctctaggatttatttctgttgtccaaaaaaaaaaaaaaagaaaagaaaaattaaggagaatttttggtgttaatgctgaggaattgcttgagtggttagttgttaccaatttctcttttgaacctttggagctaaggatgctgagtctagagaaatgctagtctcaagccctgttaagtccctctgtttctagcccgtagttcatagcatcagtgaactggagccacaacagcaaattctatcagctgtgtaccatacagcttgtgctgaaggcgaatttcttgagccattactcagtataaagcactgagttctatctttaggatttatctttaagagcaaatttctggtcagctgtgcttctgcaacctaaaatatttaaagggaggtaggtgtgggcaggaggaggaatgataaattgggccagggcaagaaaaatctagcttcatataatttgtctgggactatacaccctatataatgttagttttacagaagtaatatgacttttgattgctacataccacaaagagtttatgaactgagatcataaagggcaactgatgtgtgaagaaagtagtcagtacatcctggctcatgctctgaaagaatatccagagaggctctctcaaagatcagggagatgtattcccatgccatgcaccctgcttcccagcatttctgcatggtcaagtgagctttatgctcatgagctttaagtatataattatccaggattttaaatcctcaacttgttctagcttgtgatccctcaaagttgggtcatacgttagtgctagatactagaaattttcacttttccactgatcagagagacagacattaaaaacaaaaatagaagaaaggaaagctttcaccctgcagcttcttagcagggaacaattgtcttgccaaaacttttttcccttttctctcccattttcttttacccaatcccttcttactccttgccagtgtgaccatgctttcttctctgtagatgttaacagttaaggcctattttcctcgggcacttaaccaaccaatcagaacaccacatctgttaggggaggtaacctggccaacagtgtatccatcacgttagccctgctggagggaagggacccacattcacctgccctctgacctgccccttgatcccatatctattaccgtgtccataggaataataggtaagggctctgtctctgtcaagccatgtaacaaaggacactgttaaaaaaaaaaaaaagtctggcatcagagggagcatgtggagagcaacttgggaagaacaagttcattttgtattgaatgatttttaatgaatgcaatattaatccttgcagatgagcaataatcattaaaatcgattaaaatgataagacctta

SEQ ID NO: 117 - protein, 530 aa, Homo sapiens
MSMPDAMPLPGVGEELKQAKEIEDAEKYSFMATVTKAPKKQIQFADDMQEFTKFPTKTGRRSLSRSISQSSTDSYSSAASYTDSSDDEVSPREKQQTNSKGSSNFCVKNIKQAEFGRREIEIAEQDMSALISLRKRAQGEKPLAGAKIVGCTHITAQTAVLIETLCALGAQCRWSACNIYSTQNEVAAALAEAGVAVFAWKGESEDDFWWCIDRCVNMDGWQANMILDDGGDLTHWVYKKYPNVFKKIRGIVEESVTGVHRLYQLSKAGKLCVPAMNVNDSVTKQKFDNLYCCRESILDGLKRTTDVMFGGKQVVVCGYGEVGKGCCAALKALGAIVYITEIDPICALQACMDGFRVVKLNEVIRQVDVVITCTGNKNVVTREHLDRMKNSCIVCNMGHSNTEIDVTSLRTPELTWERVRSQVDHVIWPDGKRVVLLAEGRLLNLSCSTVPTFVLSITATTQALALIELYNAPEGRYKQDVYLLPKKMDEYVASLHLPSFDAHLTELTDDQAKYLGLNKNGPFKPNYYRY

SEQ ID NO: 118 - DNA, 110 bp, Homo sapiens
gacagaaatggattcgaaatatcagtgtgtgaagctgaatgatggtcacttcatgcctgtcctgggatttggcacctatgcgcctgcagaggttcctaaaagtaaagctt

SEQ ID NO: 119 - DNA, 6543 bp, Homo sapiens
aaacatttgccagccaggctagtgacagaaatggattcgaaatatcagtgtgtgaagctgaatgatggtcacttcatgcctgtcctgggatttggcacctatgcgcctgcagaggttcctaaaagtaaagctttagaggccaccaaattggcaattgaagctggcttccgccatattgattctgctcatttatacaataatgaggagcaggttggactggccatccgaagcaagattgcagatggcagtgtgaagagagaagacatattctacacttcaaagctttggtgcaattcccatcgaccagagttggtccgaccagccttggaaaggtcactgaaaaatcttcaattggattatgttgacctctaccttattcattttccagtgtctgtaaagccaggtgaggaagtgatcccaaaagatgaaaatggaaaaatactatttgacacagtggatctctgtgccacatgggaggccgtggagaagtgtaaagatgcaggattggccaagtccatcggggtgtccaacttcaaccgcaggcagctggagatgatcctcaacaagccagggctcaagtacaagcctgtctgcaaccaggtggaatgtcatccttacttcaaccagagaaaactgctggatttctgcaagtcaaaagacattgttctggttgcctatagtgctctgggatcccaccgagaagaaccatgggtggacccgaactccccggtgctcttggaggacccagtcctttgtgccttggcaaaaaagcacaagcgaaccccagccctgattgccctgcgctaccagctacagcgtggggttgtggtcctggccaagagctacaatgagcagcgcatcagacagaacgtgcaggtgtttgaattccagttgacttcagaggagatgaaagccatagatggcctaaacagaaatgtgcgatatttgacccttgatatttttgctggcccccctaattatccattttctgatgaatattaacatggagggcattgcatgaggtctgccagaaggccctgcgtgtggatggtgacacagaggatggctctatgctggtgactggacacatcgcctctggttaaatctctcctgcttggtgatttcagcaagctacagcaaagcccattggccagaaaggaaagacaataattttgttttttcattttgaaaaaattaaatgctctctcctaaagattcttcacctactttggtctccataacttctatgttttctttccttctgacacactagtgcccctaaattgtgatttgcctatacgtttagggccggggttggaagatgttaacaaccatttaagattcatttctgcagtgggagtgggtggagtttcaccctctgggaaaggggcaggtgacaggtatttatcagtcagtgcctctctagctcttgtaggaagaagcacacgcaggatggagtctagaggatgagcgatattgactagcaattcatgggctccctccagcagtgcgagggtcagagtttctggagccttgggaggaggcatccctgtgagggggggttagggagatgggagggcaccaggaaaagtgattagaagtcaggtatgggaaggctaaataggacagagtcgagtacatctctgcttggaaaaacatatcaacacccttttttttgaacattatatcttgctcataaaagaaaactttccacattgttttaacaaaccccacagctgagagtcaggcctgaatctttgatgtgtgcccattcacaacgttgaccctattggtttgtggtggggcagggcatcaaagacatcattgactaatcacattcccctgaatagctcatatttagaaaatattcttagattctaaaaatgtactattaatttgtgatattcagtcttttaaatattttatacattaaacaggcatagttacaaatataaaacaaaaatatcccaaagccattatgcatggcactcaagattaaaatgggaaataatacatctaataaatcaaatgttccaagacttcaaaggtcttttggaaacaggctatgtaaaacagcacactggtttcaaactttggtaaattttaagaacaactcttacaaaggcatttaattcttatacataattttcaggggacctaagttaatcagctaatcatgaagacatgattttcattttagaaaacacttttgaaaacttgggataatctcatgccttaatgatcaaagcattatgagaaggacagtggtttttaacctgggcatatgttctaacacatttactctccactattcgtactctggtagccatgttaaccccatcagagattccttctcaagccatgtctcagagctgagaggcatcccagcaagttttgcagctcacagttttttccgtaaattacttattctataaaattggagtaggccataaactttggagggccctagaccaattttttggattatttttcgtcttctatcattccgctgatcttagatattctctgcattaaatattaaatatcacttctaggctgaaaaatccccctaaaaatatttctagctcagatttttcctccaaattctgcaatagaagatcacaatgtgaactctgcatctccatgttaaagtctaatggacattcacacttagcatgtctcaaagaaatctcatgtaaaccatggccatcctgttctaccttaactttctgagtctatggaatgataatttcacatctcataaacttgactgatgtaagtgtcaagaaaagattgacattttgttaaaagttagtagtgaagtgtgtaacgcttaagcaaactttcatatttcaaatctctttagcaagtgtaactcttttttcaagatgtgaaataatcattaggtcagtcatttgtaaatagtacatctgctatggactttttccagttcttcaccatccatttttataaaactcttattgttaaaaaaaaagttactcagaatttcataaagccaaacacctgatttcaggaacacttgagatgtaagaaaattttatagggacctccaatcactaattttcctattttttctctcaaagaaatgctgaagggaggaattcaggttgaatgaaaggaaatagtaacttacagccatatagagttataaagacttcttgtaaatgtgaacatatggtaaaatataaaaacatgtatttttgaaattttggattctactcattattttacttcaatttaagatataaatgtatagaaataagtataattctaagctaatacgtatgcaatgtaggaagctgtaattactgaccaaaactatgtgaagtggagaaaacctggggaagtggatggttttagatgaaactgaagttaaattcatattgatttaaagtaaattgttataactttataaagtttttcatcatcaccacagcaatcacaaagagaataattatgaatatacgcaagaggaaatgagaagggaatccaaatgtcattaaaaaaaaatcacgccacctcacaaaatggtaacagtggatataaaggatagaaagctataaacctggtaggaaaacattgaaaatggcacaagtgactccttccctgtcaccaatgacagtcatgtgttgcataatgcctgggctatcttctgagaatggctttgttaggcaactgtgtcatggtggggacatgatagcattagagagaattctctcaaacactgtcatggccttatcaactatgcttctgtaatattctgaatccttcgctgcctttccaacagtgtttacaacggtttcctaagaaatgaaatccatttcaccaaaccacttttcttgctcatccataagaaacacttctcctttgttaaaattacatcatgagattgcaagcattcagtaacttgcaagctccaatttgaattctagttgtcttgctatttccaccacatctgcaattactttctccactgaaatcttgcattcctccaagtcatccaggagggttgaattcacttctttcaaactcctgttcaagtaaatgttttgccctcctgtcacgaatcatgaatgtttttaatggcatctagaatagtaaatctttttcagaagattttcaattttcttttcccaggttcttcagacaagtcaccatggtagctgtagacttatgaaatgtatttcctgaaccataaaacaagaacatcaaaattactctatgatccatgggaaacagaatgcatgttgtgttagcaggcatggaaagaacagtaatctctttcaacctctgtaagagagttcttggttgattaggtaccttgtcgataggcagttctaatttcaaagaactttttcttttgctgagcagtaagtcttaacagtgggcttaaaatattcagtaaaccattatttaaggagatgtggcttaaatatctaggctttcttgctttatttatagaacacttacagagtagatatagattaaatcttaaggaccctaggattgttagaatagtaaatgaacatcatatgttgtaatatagttagccagggaggggaaagatctctacaagaaataattttaaaaactactcaaagaaatcagagatatcacaaaatgacaaaacaagtacaggggcagcaaaaggtaacagatgtcaactatgagatctcatcaagaactaagaaaatggagaaaagtaccagatggcagatgggaggcagtgtgagcatgcctctcccacttggagattagtgtgtagagatttacattgtgaatttcttttcaagaaccaatgcagagacttaacagatatatgaaaaaatttcacatacactctgaagaagtctcaggcacaatcctactccatgaaataagaaaaaaccatcacatccccagattctgaggggagagagttcactccagagcatacatccccactggggatctggaaattcaggccacaagagaaggctttgatcctgtgcggacaagtgccttgagcagaatccacaggggagagctggaagtgcatggcagatatgagcacagaagctgggtgtccagccttgtgggcagaccgggagggatgtggcctgaaagccatggttattatctcagcgtgtaagctgatgatctgaggctggtcagagttctgtgcgcagactgcctggatgtaaacctggcactgttagcagagcactgcatgaatgaaaggaatgaaaatagccttgccaactgcataggtgctgggtgaggctcactgtggggggcgcacggcaagctattcaacattacgtacaggcatttgaggtcggggcatggaaaaatactgaggcagtgtgtgtatgttatttgtgctgagaatgaaactccttgaccttgaaaacaggacagggagtggtgtgtgtgctgtgataaggaatgctgaaaacggtctcctgagaatgcggtttgagtgcttttacaaggccacaggtgtctcacgacctgacctcataaagccatctagtggatgtttgtggcttaacaagccccttcaataagtacttggcggagggatgctggggggaccttcttagaagagctgcgccccacccccctccctggacagcccagctacaattgtctgagaactcactgcaagctgtaagcggcccactacttcccactcccttttttgaactcttctgtgcagcagaggcaattaaactctcctctggaacattaccccagcagcctgagaaccaccccttggcgctcacaggggctgcagcctgccttatccaaggacagttagagtgcagacccacctaaccctggacccactggtggtacccatccacccatcctggtagcttaacacaaagatacacttttaggagcttcatagcccctcttcccccattgcctgagaaaccactttccctgggcaacttagggcaagctcaaatcccactgctaccaccacagctggtgctcttttgcaagtgccacctcctagctggagaccaaccagcacagtccacacagcacctcaaggaagaataaatagaactgttcccaggaaggagaaaatgcctgcatgagctcagctgttaccactgcgtaccacaccctgaccagtcagaggtcttgagtcggtccgcatgacaagttcaccgctcgcataaccagcattcaagaaagccagcacactaagcctatctacagccagggagtctcagagtctacgtcactcccctgccacctcaatcagagctggtgctggtatccactgctgggagacttgtgctgaggtgaagcctgggctggatggctggaggatgaagaactgcacggaggagatggaggcacccagacagatgccccatggacatcctgaagcagagctgcctcactgccctgcacacacatgagagcgcagccaggaacagaaggactgggcaacattcaggcggagcccaggccaattttctaaacatggaatatgagttaaataaatggcttcgtattaaa

SEQ ID NO: 120 - protein, 323 aa, Homo sapiens
MDSKYQCVKLNDGHFMPVLGFGTYAPAEVPKSKALEATKLAIEAGFRHIDSAHLYNNEEQVGLAIRSKIADGSVKREDIFYTSKLWCNSHRPELVRPALERSLKNLQLDYVDLYLIHFPVSVKPGEEVIPKDENGKILFDTVDLCATWEAVEKCKDAGLAKSIGVSNFNRRQLEMILNKPGLKYKPVCNQVECHPYFNQRKLLDFCKSKDIVLVAYSALGSHREEPWVDPNSPVLLEDPVLCALAKKHKRTPALIALRYQLQRGVVVLAKSYNEQRIRQNVQVFEFQLTSEEMKAIDGLNRNVRYLTLDIFAGPPNYPFSDEY

SEQ ID NO: 121 - DNA, 100 bp, Homo sapiens
gaggcctggaacggattcgtggctgctgctgaactgcccaggaatgaggcagatgagctccgtaaagctctggacaaccttgcaagacaaatgatcatga

SEQ ID NO: 122 - DNA, 2795 bp, Homo sapiens
attatacagacgcataactggaggtgggatccacacagctcagaacagctggatcttgctcagtctctgccaggggaagattccttggaggaggccctgcagcgacatggagggagctgctttgctgagagtctctgtcctctgcatctggatgagtgcacttttccttggtgtgggagtgagggcagaggaagctggagcgagggtgcaacaaaacgttccaagtgggacagatactggagatcctcaaagtaagcccctcggtgactgggctgctggcaccatggacccagagagcagtatctttattgaggatgccattaagtatttcaaggaaaaagtgagcacacagaatctgctactcctgctgactgataatgaggcctggaacggattcgtggctgctgctgaactgcccaggaatgaggcagatgagctccgtaaagctctggacaaccttgcaagacaaatgatcatgaaagacaaaaactggcacgataaaggccagcagtacagaaactggtttctgaaagagtttcctcggttgaaaagtgagcttgaggataacataagaaggctccgtgcccttgcagatggggttcagaaggtccacaaaggcaccaccatcgccaatgtggtgtctggctctctcagcatttcctctggcatcctgaccctcgtcggcatgggtctggcacccttcacagagggaggcagccttgtactcttggaacctgggatggagttgggaatcacagccgctttgaccgggattaccagcagtaccatggactacggaaagaagtggtggacacaagcccaagcccacgacctggtcatcaaaagccttgacaaattgaaggaggtgagggagtttttgggtgagaacatatccaactttctttccttagctggcaatacttaccaactcacacgaggcattgggaaggacatccgtgccctcagacgagccagagccaatcttcagtcagtaccgcatgcctcagcctcacgcccccgggtcactgagccaatctcagctgaaagcggtgaacaggtggagagggttaatgaacccagcatcctggaaatgagcagaggagtcaagctcacggatgtggcccctgtaagcttctttcttgtgctggatgtagtctacctcgtgtacgaatcaaagcacttacatgagggggcaaagtcagagacagctgaggagctgaagaaggtggctcaggagctggaggagaagctaaacattctcaacaataattataagattctgcaggcggaccaagaactgtgaccacagggcagggcagccaccaggagagatatgcctggcaggggccaggacaaaatgcaaacttttttttttttctgagacagagtcttgctctgtcgccaagttggagtgcaatggtgcgatctcagctcactgcaagctctgcctcccgtgttcaagcgattctcctgccttggcctcccaagtagctgggactacaggcgcctaccaccatgcccagctaatttttgtatttttaatagagatggggtttcaccatgttggccaggatggtctcgatctcctgacctcttgatctgcccaccttggcctcccaaagtgctgggattacaggcgtgagccatcgcttttgacccaaatgcaaacattttattagggggataaagagggtgaggtaaagtttatggaactgagtgttagggactttggcatttccatagctgagcacagcaggggaggggttaatgcagatggcagtgcagcaaggagaaggcaggaacattggagcctgcaataagggaaaaatgggaactggagagtgtggggaatgggaagaagcagtttactttagactaaagaatatattggggggccgggtgtagtggctcatgcctgtaatccgagcactttgggaggccaaggcgggcggatcacgaggtcaggagatcgagaccatcctggctaacacagtgaaaccccgtctctactaaaaatacaaaaaattagccgggcatggtggcgggcgcctgtagttccagctaactgggcggctgaggcaggagaatggcgtgaacctgggaggtggagcttgcagtgagccgagatatcgccactgcactccagcctgggtgacagagcgagactccatctcaaaaaaaaaaaaaaaaagaatatattgacggaagaatagagaggaggcttgaaggaaccagcaatgagaaggccaggaaaagaaagagctgaaaatggagaaagcccaagagttagaacagttggatacaggagaagaaacagcggctccactacagacccagccccaggttcaatgtcctccgaagaatgaagtctttccctggtgatggtcccctgccctgtctttccagcatccactctcccttgtcctcctgggggcatatctcagtcaggcagcggcttcctgatgatggtcattggggtggttgtcatgtgatgggtcccctccaggttactaaagggtgcatgtcccctgcttgaacactgaagggcaggtggtgggccatggccatggtccccagctgaggagcaggtgtccctgagaacccaaacttcccagagagtatgtgagaaccaaccaatgaaaacagtcccatcgctcttacccggtaagtaaacagtcagaaaattagcatgaaagcagtttagcattgggaggaagctcagatctctagagctgtcttgtcgccgcccaggattgacctgtgtgtaagtcccaataaactcacctactcatcaa

SEQ ID NO: 123 - protein, 398 aa, Homo sapiens
MEGAALLRVSVLCIWMSALFLGVGVRAEEAGARVQQNVPSGTDTGDPQSKPLGDWAAGTMDPESSIFIEDAIKYFKEKVSTQNLLLLLTDNEAWNGFVAAAELPRNEADELRKALDNLARQMIMKDKNWHDKGQQYRNWFLKEFPRLKSELEDNIRRLRALADGVQKVHKGTTIANVVSGSLSISSGILTLVGMGLAPFTEGGSLVLLEPGMELGITAALTGITSSTMDYGKKWWTQAQAHDLVIKSLDKLKEVREFLGENISNFLSLAGNTYQLTRGIGKDIRALRRARANLQSVPHASASRPRVTEPISAESGEQVERVNEPSILEMSRGVKLTDVAPVSFFLVLDVVYLVYESKHLHEGAKSETAEELKKVAQELEEKLNILNNNYKILQADQEL

SEQ ID NO: 124 - DNA, 104 bp, Homo sapiens
tacttccgggagagagtcagcccagtgcatctgcaaatcctgctgactaacaatgaagcctggaagagattcgtgactgcggctgaattgcccagggatgaggc

SEQ ID NO: 125 - DNA, 2145 bp, Homo sapiens
agcaggagggtgggaccaagggtgctgctggaccaaggatgggactgggccaagggtggggctgggaagcatcctgttttgcatgtttgatcaggagctgctgccaagttgtgactttcactttcccttttgggttccagggtatatctcagagcctggagaacgtgtctggttattatgcagatgcacggctggaggtgggatccacacagctcagaacagctggatcttgctcacactctttcaagagaagcttccttgaaaagaaacgctttactgaagaggccaccaaatacttccgggagagagtcagcccagtgcatctgcaaatcctgctgactaacaatgaagcctggaagagattcgtgactgcggctgaattgcccagggatgaggcagatgctctctacgaagctctgaagaagcttagaacatatgcagctattgaggacgaatatgtgcagcagaaagatgagcagtttagggaatggtttttgaaagagtttccccaagtcaagaggaagatccaggagtccatagaaaagcttcgtgcccttgcaaatggtattgaagaggtccacagaggctgcaccatctccaatgtggtgtccagctccactggcgctgcctctggcatcatgtcccttgctggtcttgttttggcaccatttacagcagggacgagtctggcccttactgcagctggggtagggctgggagcagcgtctgctgtgactgggatcaccaccagcatcgtggagcactcatacacatcatcagcagaagctgaagccagcaggctgactgcaaccagcattgaccgattgaaggtatttaaggaagttatgcgtgacatcacacccaacttactttcccttcttaataattattacgaagccacacaaaccattgggagtgaaatccgtgccatcaggcaagccagagccagggcccgactccctgtgaccacctggcgaatctcagctggaagtggtggtcaagcagagagaacgattgcaggcaccacccgggcagtgagcagaggagcccggatcctgagtgcgaccacttcaggcatcttccttgcactggatgtggtcaaccttgtatacgagtcaaagcacttgcatgagggggcaaagtctgcatctgctgaggagctgaggcggcaggctcaggagctggaggagaatctaatggagctcactcagatctatcagcgtctgaatccatgccatacccactgaccccagaccagtgcagccagcaggggaggtgagccatacacaggccacgacaaaatgcaggcattttattagggggataaagagggcaaggtaaagtttatggagctgagtgttagtgactttggcatttctgtagctgagcacagcaggggaggggttaatgcagatggcaagtgcaccaaggagaaggcaggaatgctggagcctggaataagggaggagaggggactggagagtgtggggaataggaagaagaaatttcctttagactaacgaatatattggggggaggaatagaggggaggtgtgcaggaaccagcaatgagaaggccaggaaaagaaagagctgaaaatgcagaaagccgaagagttagaacttttggatacagcagaagaaacagcggctccactaccgacctgcccccggttcgatgtccttccaagaatgaagtctttccctggtgatggtcccctgccctgtctttccagcatccactctgtcttgtcctcctggaagtgtatctcagtcagccagtggcttcttgatgatggcggtggaggtggtggttgtagtgtgatggatcccctttaggttatttaggggtatatgtcccctgcttgaaccctgaaggccaggtaatgagccatggccattgtccccagctgaggaccaggtgtctctaaaaacccaaacatcctggagagtatgcgagaacctaccaagaaaaacagtctcattactcatatacagcaggcaaagagacagaaaattaactgaaaagcagtttagagactgggggaggccggatctctagagccatcctgctgagtgccctgtgtgtaagtcctaataaactcacctactcaccaagctggaaaaaaaaaaaaaaaaaaaaaa

SEQ ID NO: 126 - protein, 402 aa, Homo sapiens
MGLGQGWGWEASCFACLIRSCCQVVTFTFPFGFQGISQSLENVSGYYADARLEVGSTQLRTAGSCSHSFKRSFLEKKRFTEEATKYFRERVSPVHLQILLTNNEAWKRFVTAAELPRDEADALYEALKKLRTYAAIEDEYVQQKDEQFREWFLKEFPQVKRKIQESIEKLRALANGIEEVHRGCTISNVVSSSTGAASGIMSLAGLVLAPFTAGTSLALTAAGVGLGAASAVTGITTSIVEHSYTSSAEAEASRLTATSIDRLKVFKEVMRDITPNLLSLLNNYYEATQTIGSEIRAIRQARARARLPVTTWRISAGSGGQAERTIAGTTRAVSRGARILSATTSGIFLALDVVNLVYESKHLHEGAKSASAEELRRQAQELEENLMELTQIYQRLNPCHTH

SEQ ID NO: 127 - DNA, 107 bp, Homo sapiens
ccccagtggagccggagtgcgggcgcgccccaccaccgccctcaccatggtgctgttggcagcagcggtctgcacaaaagcaggaaaggctattgtttctcgacagt

SEQ ID NO: 128 - DNA, 3994 bp, Homo sapiens
atcttggcaagaggcgaagcggcagcggttcctgtcaagggggcagcaggtccagagctgctggtgctcccgttccccagaccctacccctatccccagtggagccggagtgcgggcgcgccccaccaccgccctcaccatggtgctgttggcagcagcggtctgcacaaaagcaggaaaggctattgtttctcgacagtttgtggaaatgacccgaactcggattgagggcttattagcagcttttccaaagctcatgaacactggaaaacaacatacgtttgttgaaacagagagtgtaagatatgtctaccagcctatggagaaactgtatatggtactgatcactaccaaaaacagcaacattttagaagatttggagaccctaaggctcttctcaagagtgatccctgaatattgccgagccttagaagagaatgaaatatctgagcactgttttgatttgatttttgcttttgatgaaattgtcgcactgggataccgggagaatgttaacttggcacagatcagaaccttcacagaaatggattctcatgaggagaaggtgttcagagccgtcagagagactcaagaacgtgaagctaaggctgagatgcgtcgtaaagcaaaggaattacaacaggcccgaagagatgcagagagacagggcaaaaaagcaccaggatttggcggatttggcagctctgcagtatctggaggcagcacagctgccatgatcacagagaccatcattgaaactgataaaccaaaagtggcacctgcaccagccaggccttcaggccccagcaaggctttaaaacttggagccaaaggaaaggaagtagataactttgtggacaaattaaaatctgaaggtgaaaccatcatgtcctctagtatgggcaagcgtacttctgaagcaaccaaaatgcatgctccacccattaatatggaaagtgtacatatgaagattgaagaaaagataacattaacctgtggacgagacggaggattacagaatatggagttgcatggcatgatcatgcttaggatctcagatgacaagtatggccgaattcgtcttcatgtggaaaatgaagataagaaaggggtgcagctacagacccatccaaatgtggataaaaaacttttcactgcagagtctctaattggcctgaagaatccagagaagtcatttccagtcaacagtgacgtaggggtgctaaagtggagactacaaaccacagaggaatcttttattccactgacaattaattgctggccctcggagagtggaaatggctgtgatgtcaacatagaatatgagctacaagaagataatttagaactgaatgatgtggttatcaccatcccactcccgtctggtgtcggcgcgcctgttatcggtgagatcgatggggagtatcgacatgacagtcgacgaaataccctggagtggtgcctgcctgtgattgatgccaaaaataagagtggcagcctggagtttagcattgctgggcagcccaatgacttcttccctgttcaagtttcctttgtctccaagaaaaattactgtaacatacaggttaccaaagtgacccaggtagatggaaacagccccgtcaggttttccacagagaccactttcctagtggataagtatgaaattctgtaataccaagaagagggagctgaaaaggaaaattttcagattaataaagaagacgccaatgatggctgaagagtttttcccagatttacaagccactggagaccccttttttctgatacaatgcacgattctctgcgcgcaaggaccctcgactcacccccatgtttcagtgtcacagagacattctttgataaggaaatggcacaaacataaagggaaaggctgctaattttctttggcagattgtattggccagcaggaaagcaagctctccagagaatgcccccagttaaatacctcctctacctttacctaagttgctcctttatttttattttattattattattattattattattattttttgagatggagtctcactttgtaacccaggctggaatgcaatggcatgatctcagctcactgcaacctccgcctcctgggttcaagcaagtctcctgcctcagcctccgagtagctgggactacaggtgcacgccaccacgcctggctaattttttgtattttagtagagacggggtttcaccgtgttgcccaggctggtcgcgaactcctgagctcaggcaatccgcccacctcagcctcccaaagtgttgggattacaggcatgagccaccatgcccagctgctcctttattttaatccctaaatataatccctaaatatagttatatttcatacttagtttgtttttaaaaagttttctctgtagaaaattttaatcattcataccctttacctttaggtttttctttctatacattcagtcaggcactgggatcatctgtttacaggcattatatttatttggcactcctggaacaagtatatctaacccattcttgatttttggactattcaggtgaactatttgaggggtatggggtctagaagttaaaagatacgcatgtcttctgttcttttcccgtatcaattcattccttcatctctttgccaagttgttttcctttcagggcctgtccttccagtttagaacagtaccatgaatcccacttgtgtcaatattaaagatagctgagaagcacctttcaaatggcacagtccctcttcaagatgtctaaaagaatggttatgtctgtccagttagggatttcacatccacatgtaatcatgtctgctgctgttgctacccaaattttcatttctccacattttgggtacttaagctaaaacgtaatggccacagtctgtaatccattcacattcctcagtttcaccacctccctcttccagactgcactctctgtcatcagtcccctcctttctaacagaaatggggttatgattttgaaggctgtgggttcagggagtctttgccaatcctgttggccctaaactatcaaggaggctccatttcaccatttgattttttgcatttcaggaggcaactgattgtttcgatatgtacatattactcacgtataccccatttccttccagtcagcccaacattttccaccagtctgtccccatctctgaaatccttccttctctttccccctaagtcttttgagtgtcatcatgtactggtggtttctcggttccatctcatccatttccttttcaatggagactacagcgtcagccagctcagccttggcttttaactcaatattccagtccataggggtggttaaaagttgctgcaaggctgcaggcactggcagtgggaagaggcagacgactagatgacttctgcacttttagctggttgaaaagtaccactcccactctgaacatctggccgtccctgcaaagagtgtactgtgcttgaagcagagcactcacacataaatggctgtgtgtggaattgcttgccaaagaagtttctagcctttccctttcccctaactgcatcagggaagaattcttatctctagcttggtttccacatgaggtttttctgagaagggcttgggacaagaagtctgtcatgttagttaagcaggcaagaaatcctactaatccagttttgtttgaaagttgtttgtccgtatgattttttaaaagtcaagtttaatttcaaaaaaccttttttttctgagattacttttggggtaatatttaaaatgagagacattttgtaaccctgtaaaatacatagggaatataacattccagtgtatacaaagaaggcaaattctttaatcaaataaagcgcattataaaatgagatgtttattggattattgactcactttggtgtctgcttgttgattcaggatgctgtaatgggacctaacattaaaaattaatgacatgttttttttaagagaaa

SEQ ID NO: 129 - protein, 511 aa, Homo sapiens
MVLLAAAVCTKAGKAIVSRQFVEMTRTRIEGLLAAFPKLMNTGKQHTFVETESVRYVYQPMEKLYMVLITTKNSNILEDLETLRLFSRVIPEYCRALEENEISEHCFDLIFAFDEIVALGYRENVNLAQIRTFTEMDSHEEKVFRAVRETQEREAKAEMRRKAKELQQARRDAERQGKKAPGFGGFGSSAVSGGSTAAMITETIIETDKPKVAPAPARPSGPSKALKLGAKGKEVDNFVDKLKSEGETIMSSSMGKRTSEATKMHAPPINMESVHMKIEEKITLTCGRDGGLQNMELHGMIMLRISDDKYGRIRLHVENEDKKGVQLQTHPNVDKKLFTAESLIGLKNPEKSFPVNSDVGVLKWRLQTTEESFIPLTINCWPSESGNGCDVNIEYELQEDNLELNDVVITIPLPSGVGAPVIGEIDGEYRHDSRRNTLEWCLPVIDAKNKSGSLEFSIAGQPNDFFPVQVSFVSKKNYCNIQVTKVTQVDGNSPVRFSTETTFLVDKYEIL

SEQ ID NO: 130 - DNA, 109 bp, Homo sapiens
ctggcagcagaggtactttgtgctgagggcgcagcagctctactactacaaggatgaagaggacacgaagccccagggctgcatgtatctaccaggatgtacaatcaag

SEQ ID NO: 131 - DNA, 2969 bp, Homo sapiens
agttgtttatcacgacctcaactcagtaaggcctgagattctttcgaaaaggagctttgcttcccatgacgcagagggaagtgtcaactgggatatttctggtaaaactgaaagcaagaaaagcagggtgctagcccctgtgggactgagggtggaggctgggggagtttgggtgccatcctccagtgacagatggatggacctttcatctaagagaaaggaggagacacgttggcaaatcagcctcaagcctaagattgcttgtgaagcaatcataaggaggaacaaaaacagacacaaaaacagagggaaagagtgaaaagacaagaagggcgcaaactgtgacagactcaccgcttcactaactactcacttaaactggaagcaaaatgtccctaaaattgccaaggaactgggatttcaacctgaaagtggaggctgcgaaaatagctcggtcaaggagtgtgatgactggcgagcagatggctgccttccatccatcgtccacccccaacccgctggagaggcccatcaagatgggctggctgaagaagcagaggtccatcgtgaagaactggcagcagaggtactttgtgctgagggcgcagcagctctactactacaaggatgaagaggacacgaagccccagggctgcatgtatctaccaggatgtacaatcaaggagatcgccacaaacccagaagaagctgggaagtttgtctttgaaatcattccagcctcatgggaccagaatcgcatgggacaggactcctatgtcctcatggccagctctcaggcggagatggaggagtgggttaaattcctcaggagagttgctggcacaccctgtggagcagtgtttggccagcgcttggatgagactgtggcctatgaacagaaattcggcccccatctggtgcccatcctggtggagaaatgtgcagagttcatcctggagcacggccggaatgaagagggcatcttccgtctgcctgggcaggacaacctggtgaagcagctgagagacgcttttgatgctggggagcggccctcctttgacagagacacagatgtgcacactgtggcttccctgttaaagctctacctccgagacctcccagagcccgtggttccctggagccagtacgaagggttcctgctctgtgggcagctcacgaatgcggatgaggcaaaggctcagcaggagttgatgaagcagctctccatccttcctcgtgacaactatagtctcctgagctacatctgcaggttcctacatgaaatacagctgaactgtgctgttaacaagatgagtgtggacaacctggctactgtgattggtgtgaatctcatcaggtcgaaggtcgaagaccctgccgtgatcatgagagggactcctcagatccaaagagtgatgactatgatgatcagagaccatgaagtcctcttccccaagtccaaggatatacccctgtcaccccctgcccagaaaaatgaccccaagaaagctccagtggcccgaagctctgtaggctgggatgccactgaagacctccgaatttctaggacagacagcttcagtagcatgacaagcgactctgatacaaccagccccaccggacagcagccgagcgatgcgtttccggaggacagcagcaaagtacccagggaaaagccaggagactggaaaatgcaatctcgtaaaaggactcaaacactccctaaccggaaatgtttcttgacatcagcttttcagggtgccaacagcagcaaaatggagatctttaaaaatgaattctggtcgccttcctcagaggctaaggcaggggaagggcacaggagaacgatgtctcaagacttgcgccaactttctgactcccaacggacttccacctacgataacgtcccttccctgccagggtcccctggggaggaagccagtgcactctcttcccaagcctgtgactccaagggagatactcttgccagtccaaactctgaaactgggcctggaaaaaagaactctggagaagaggaaattgattctttgcagaggatggtccaagagctacgaaaggaaatagaaacacagaagcaaatgtatgaggaacagattaaaaaccttgagaaggaaaattatgacgtttgggctaaagtggtgaggctcaatgaagaactggagaaggaaaagaagaagtctgcagccctagagatcagcctccgcaacatggagcgctcccgggaggatgttgagaagaggaacaaggccttggaagaagaagtcaaggaatttgtcaaatccatgaaggaacccaagaccgaggcttaagggtcccaggagtactgcagggacagccccagagaggcccaactctggcccctttctcagtgctatctgatgacggggaaacaaaattattctctgagagggaaaggacatttgagggaaacatcaaatttccccataaataaatgaatggagtttgcaggaaggtgagggtgagcagagatgtgtgtggacatctctgaccatccatcgctgtattcaaatggattgttttattccattctggtctcaggcatgaccacgtccagtgaagacatttgaggcagcacatctcaggacccaggcaatagactggccccaactcaggctggactaaggtgtgattaattctttgttttttgtgtggaacagctcaccttgtcagacagcctcagggcatctctgagacacaggggcagaaaatgacattcatcttttgagtcctcatccatggagtgctgtgtttggggggctgcatctgctgaagcgagaaccccattctgccaccccaccaggatgcccattctccaggacttctccaacttactattagactaaaccagaacaagcaacaaactgtatttatgcaagcaaaattgatgagaaaattatattcaaataaagcaaaaattaaaaaaaaaa

SEQ ID NO: 132 - protein, 646 aa, Homo sapiens
MSLKLPRNWDFNLKVEAAKIARSRSVMTGEQMAAFHPSSTPNPLERPIKMGWLKKQRSIVKNWQQRYFVLRAQQLYYYKDEEDTKPQGCMYLPGCTIKEIATNPEEAGKFVFEIIPASWDQNRMGQDSYVLMASSQAEMEEWVKFLRRVAGTPCGAVFGQRLDETVAYEQKFGPHLVPILVEKCAEFILEHGRNEEGIFRLPGQDNLVKQLRDAFDAGERPSFDRDTDVHTVASLLKLYLRDLPEPVVPWSQYEGFLLCGQLTNADEAKAQQELMKQLSILPRDNYSLLSYICRFLHEIQLNCAVNKMSVDNLATVIGVNLIRSKVEDPAVIMRGTPQIQRVMTMMIRDHEVLFPKSKDIPLSPPAQKNDPKKAPVARSSVGWDATEDLRISRTDSFSSMTSDSDTTSPTGQQPSDAFPEDSSKVPREKPGDWKMQSRKRTQTLPNRKCFLTSAFQGANSSKMEIFKNEFWSPSSEAKAGEGHRRTMSQDLRQLSDSQRTSTYDNVPSLPGSPGEEASALSSQACDSKGDTLASPNSETGPGKKNSGEEEIDSLQRMVQELRKEIETQKQMYEEQIKNLEKENYDVWAKVVRLNEELEKEKKKSAALEISLRNMERSREDVEKRNKALEEEVKEFVKSMKEPKTEA

SEQ ID NO: 133 - DNA, 108 bp, Homo sapiens
cctccaggatggagaagtgaggctgggtggctccctgcgaggggcattcagcaacaatgagagaattaaaaacttcttcagagtcagtttcaaaaatggatcccaaag

SEQ ID NO: 134 - DNA, 3597 bp, Homo sapiens
gagttttccagcctggagaggccgaaccagcgcgggggtcgaggagacctgagcctgccatactgagtctatggacagttccacagcaatgaatcaatgcagctgtagaggaatggaagaaaacaaggaaaggcctaaacggcagcggcaaaacaactttcccatgtttccctctcctaaagcctggaatttcagagggcgaaaacggaaacagagcacccaagatgaagatgctgttagcctttgcagtctcgacataagtgagcctagtaataaacgggtcaaacccctttcccgagtcacgtcgctagcaaacctcatcccgcccgtgaaggccacgccattaaagcgcttcagtcaaaccctgcagcgctccattagcttccgcagtgagagccgccctgacatcctcgccccccgaccctggtccagaaatgccgccccctcgagcacgaaacggagagatagcaagctgtggagtgagaccttcgatgtgtgcgtcaatcagatgcttacatccaaggaaatcaaacgtcaggaggcgatctttgagctttcccaaggagaagaagacttgatagaagacttgaaattagcaaaaaaggcctatcatgaccccatgctgaaactctccataatgacagaacaagagttgaatcaaatttttggaacactggactctctaattcctctacatgaagagctccttagtcagcttcgagatgttaggaagcctgatggctcgactgaacatgttggtcccatcctcgtgggctggctcccttgcctcagctcctatgatagctactgcagcaatcaagtagccgccaaagctctgctggaccacaaaaagcaagatcaccgagtccaggatttcctacagcgatgtttagaatccccctttagccgcaaactagatctctggaatttcctcgatattccaagaagccgcctggtaaaataccctctgcttctccgagaaatcttgaggcacacaccaaatgataatccagatcagcagcacttggaagaagctataaatatcattcagggaattgtggcagaaatcaacaccaagactggtgaatctgaatgccgctattataaagagcggcttctttacttggaagaaggccagaaagactccctgatcgacagctctcgagtcttgtgttgtcatggtgaactgaagaacaatcggggcgtgaaactgcatgttttcctgttccaagaagtgcttgtgatcactcgagccgtcacccacaatgagcagctttgctaccagctgtaccgtcagccaatccccgtgaaagacctcctgctggaagacctccaggatggagaagtgaggctgggtggctccctgcgaggggcattcagcaacaatgagagaattaaaaacttcttcagagtcagtttcaaaaatggatcccaaagtcagacccactcgctacaagccaatgacactttcaacaaacagcagtggcttaactgtattcgtcaagccaaagaaacagttttgtgtgctgccgggcaagctggggtgcttgactccgagggatcgttcctaaatcccaccaccgggagcagagagctacagggagaaacaaaacttgagcagatggaccaatcggacagtgagtcagactgtagtatggacacgagtgaggtcagcctcgactgtgagcgcatggaacagacagactcttcctgtggaaacagcaggcacggtgaaagtaacgtctgacagaagcatgtgcacttcgggaagcaggcctgcatcttacctgtacagtatttgcattccacagatggaacggtttggagaagcactttttcatacttttgtgaaagtatacatgttggcccagtctctcgtatctgtacctttgtccctagtactgtaactgccaatctgtctgtgtaagctggaatctgtggcaactattaccctgtgttgtatttcccaagtgtctggatggatggagaggtactcaaacaagttactttcagttgtcctgctggattttaaaaaaatagaaaaagaatctcaaaactactgttttacatagattgtttgaagagtccttcctcttgtgcttctgtaccactttcccagctcttagatgtggtagctaaaggcacggaatttagacggccttgtaaatagggcatgaggaactcatctgtgtattgggatggtattagagagagaatcaggaaagaccaactcatgaagtgaacttggtttgatcttactcaactagaaagcttgaaaacatccctggggattctgaaggcttaattttgcaaaggaggatgcattgtctgaactttgcaacttcatccagtgcaagtttgatgcaagaatgtattaggacataaaatagaggctgaccttaaaagggccaggacagaagcggctgccagctctgaatctttaactgaaatgcacatggcaccaggaggtgtctctcatagttggttgctagcctaaaacatcagaatagaacccaaagggcttaggaaggcctgccaggataacaagaaggccctgtattcattgtgtttcatctgcctaggcctactcattattttagagaatgaatgaagcaacaaggaagagagaccatgactctatcgatgacactgtttatagaaacacaggagaggaagaatttggaatgaaaagcacttcgtcagaaccttctgtgggagccattgagagaaaagcatggtccagtgccttctgagaaaggccagagctttgggctttcctgctctgcttttgggtcgtcaatttgccatctctggttctgtgctataatcagaattgtaattatgttctccagaggccaatttcattaactctgattaattagaatcagctagccagattagtaacctctttgtccagccttgatttacagtgcagggtaaagtgcagaccttaaaaacagctaagtacctagaagagctccctgcaagtgtaaatattaaggatgacctgtgcaaaattatacccacaccagcactagtggtaattattctaaattattgccaaaaagttttttttaatctgtctttcaagtttacagaaaagaaagcagtaaatgcattgatgtcattttattatgtacatatatcatgtgcattcaagctgtgtgacaagatatatcaatataaaaacaaggtatatactttattattttttgaaaacaaggatattgtgatcaattttaccctgtaaaacatatttctgtatttataggtcttaaacatgatgaattttttctattacaagtttatttaaaactgctttctcaagtcgttattgatacagcaagtgaacctgctgcagacagaagcagaggaaagccaagaacagcctttattggtgaagaaaagaatgaatgattctttgtaggcgccatcagccacttttagaagccatcagccagtgtgttgggaaaagaggtttgtcaagtgttggcctatgggaaggtggtcaatgaatgttttgatgaaatgaatgtttttgtataatggccttaaacttttctggaagtatttcaaataaattacattattaagtca

SEQ ID NO: 135 - protein, 558 aa, Homo sapiens
MDSSTAMNQCSCRGMEENKERPKRQRQNNFPMFPSPKAWNFRGRKRKQSTQDEDAVSLCSLDISEPSNKRVKPLSRVTSLANLIPPVKATPLKRFSQTLQRSISFRSESRPDILAPRPWSRNAAPSSTKRRDSKLWSETFDVCVNQMLTSKEIKRQEAIFELSQGEEDLIEDLKLAKKAYHDPMLKLSIMTEQELNQIFGTLDSLIPLHEELLSQLRDVRKPDGSTEHVGPILVGWLPCLSSYDSYCSNQVAAKALLDHKKQDHRVQDFLQRCLESPFSRKLDLWNFLDIPRSRLVKYPLLLREILRHTPNDNPDQQHLEEAINIIQGIVAEINTKTGESECRYYKERLLYLEEGQKDSLIDSSRVLCCHGELKNNRGVKLHVFLFQEVLVITRAVTHNEQLCYQLYRQPIPVKDLLLEDLQDGEVRLGGSLRGAFSNNERIKNFFRVSFKNGSQSQTHSLQANDTFNKQQWLNCIRQAKETVLCAAGQAGVLDSEGSFLNPTTGSRELQGETKLEQMDQSDSESDCSMDTSEVSLDCERMEQTDSSCGNSRHGESNV

SEQ ID NO: 136 - DNA, 108 bp, Homo sapiens
gctcgagacaacaccatcaacctgatccacacgttccgggactacctgcactaccacatcaagtgctctaaggcctatattcacacacgtatgcgggcgaaaacgtct

SEQ ID NO: 137 - DNA, 1410 bp, Homo sapiens
gtcggtgaagcggcagtggcggcggcggcggcggctcggcaggcgggttcaggcttcgggggccagccgccgccatgatcctgctggaggtgaacaaccgcatcatcgaggagacgctcgcgctcaagttcgagaacgcggccgccggaaacaaaccggaagcagtagaagtaacatttgcagatttcgatggggtcctctatcatatttcaaatcctaatggagacaaaacaaaagtgatggtcagtatttctttgaaattctacaaggaacttcaggcacatggtgctgatgagttattaaagagggtgtacgggagtttcttggtaaatccagaatcaggatacaatgtctctttgctatatgaccttgaaaatcttccggcatccaaggattccattgtgcatcaagctggcatgttgaagcgaaattgttttgcctctgtctttgaaaaatacttccaattccaagaagagggcaaggaaggagagaacagggcagttatccattatagggatgatgagaccatgtatgttgagtctaaaaaggacagagtcacagtagtcttcagcacagtgtttaaggatgacgacgatgtggtcattggaaaggtgttcatgcaggagttcaaagaaggacgcagagccagccacacagccccacaggtcctctttagccacagggaacctcctctggagctgaaagacacagacgccgctgtgggtgacaacattggctacattacctttgtgctgttccctcgtcacaccaatgccagtgctcgagacaacaccatcaacctgatccacacgttccgggactacctgcactaccacatcaagtgctctaaggcctatattcacacacgtatgcgggcgaaaacgtctgacttcctcaaggtgctgaaccgcgcacgcccagatgccgagaaaaaagaaatgaaaacaatcacggggaagacgttttcatcccgctaatcttgggaataagaggaggaagcggctggcaactgaaggctggaacacttgctactggataatcgtagcttttaatgttgcgcctcttcaggttcttaagggattctccgttttggttccattttgtacacgtttggaaaataatctgcagaaacgagctgtgcttgcaaagacttcatagttcccaagaattaaaaaaaaaaaaaaaagaattccacttgatcaacttaattccttttctttatcttccctccctcacttcccttttctcccaccctcttttccaagctgtttcgctttgcaatatattactggtaatgagttgcaggataatgcagtcataacttgttttctcctaagtatttgagttcaaaactcctgtatctaaagaaatacggttggggtcattaataaagaaaatctttctatctta

SEQ ID NO: 138 - protein, 300 aa, Homo sapiens
MILLEVNNRIIEETLALKFENAAAGNKPEAVEVTFADFDGVLYHISNPNGDKTKVMVSISLKFYKELQAHGADELLKRVYGSFLVNPESGYNVSLLYDLENLPASKDSIVHQAGMLKRNCFASVFEKYFQFQEEGKEGENRAVIHYRDDETMYVESKKDRVTVVFSTVFKDDDDVVIGKVFMQEFKEGRRASHTAPQVLFSHREPPLELKDTDAAVGDNIGYITFVLFPRHTNASARDNTINLIHTFRDYLHYHIKCSKAYIHTRMRAKTSDFLKVLNRARPDAEKKEMKTITGKTFSSR

SEQ ID NO: 139 - DNA, 107 bp, Homo sapiens
gtctttcttcttatacggtgcccttagaaaaggacaactcagaagagtttcgtcagcgagagctgcgtgcggcccagttggctcgagagattgaatcaagcccccag

SEQ ID NO: 140 - DNA, 4425 bp, Homo sapiens
agccgcgagaccccctccccttccgcctcgcggcgcttcctcgcgccgcggtcttctctctccacccccgacaccgcggggctccccccgcccgcccacggcgggccccggctgcccgatccccctcgcttcccgcgctctccagcggggccccagccccggccccctctctccctcccttctctctaattccccttccggacgctgccatcatgttgaagcctcagccgctacaacagccctcccagccccagcagccgccccccacgcaacaggccgtggcccgtcggccccccgggggcaccagccctcccaacggcggcctcccggggccgctggccacctctgcggctcctcccgggcctccagcggccgcctccccctgcctggggcctgtggccgctgccgggagcgggctccgccggggagccgaaggcatcttggcgccgcagccgccgccgccgcagcaacaccaggagaggccgggggcagccgccatcggcagcgccaggggacagagcacaggaaagggacccccacagtcacctgtgtttgaaggcgtctacaacaattccagaatgctgcatttccttacagctgttgtgggctccacttgtgatgtaaaggtgaaaaatggtaccacttatgagggtatcttcaagacgctaagctcaaagtttgaactagccgtggatgctgtgcaccggaaagcatctgagccagcaggtggccctcgtcgggaggacattgtggacaccatggtgtttaagccaagtgatgtcatgcttgttcacttccgaaatgttgacttcaactatgctactaaagacaagttcaccgattcagccattgccatgaactcgaaagtgaatggggaacacaaagagaaggtgcttcagcgctgggaggggggtgacagcaacagcgacgactatgacctcgagtctgacatgtccaatggatgggaccccaatgaaatgttcaagttcaatgaggagaactacggtgtgaagactacctatgatagcagtctttcttcttatacggtgcccttagaaaaggacaactcagaagagtttcgtcagcgagagctgcgtgcggcccagttggctcgagagattgaatcaagcccccagtaccgcctacggatcgccatggagaacgacgatgggcgcactgaagaggagaagcacagtgcagtccagcggcagggctcagggcgggagagccccagcttggcatccagggaggggaagtatatccctctgcctcaacgagtccgggaaggtccccggggaggagttcgatgcagcagctctcggggcggtcggcctggccttagctctttgccacctcgtggccctcaccatctggacaacagcagccctggcccaggttctgaggcccgtggtatcaatggaggcccttcccgcatgtccccaaaggcacagcggcctctgagaggtgccaagactctgtcttcgcccagtaataggccttctggagaaacttctgttccacctcctcctgcagtgggccggatgtatcccccgcgttctcccaagtctgctgcccctgccccaatctcagcttcctgtccagagcctcccatcggctcggcagtgccaacctcttcagcctccatccctgtgacctcatcagtctcagatcctggagtgggctccatttctccagcttctccaaagatctccctggcccccacagatgtaaaagaactctctaccaaggaacctgggagaactctggagccccaggagctggctcggatagctgggaaagtccctggtcttcagaatgaacagaaacgattccaactggaagaactgagaaagtttggggcccagtttaagcttcagcccagtagctcccctgagaacagcctggatccttttcctccccggatcttaaaggaggagcccaaaggaaaggagaaagaggttgatggtctgttgacttcagagcccatggggtctcccgtctcctccaagacagagtccgtatcggataaggaggacaaaccacccctggcaccatcaggaggcactgaggggccagagcagcccccaccaccttgtccaagccaaactggcagccccccggtgggcctcatcaagggagaagacaaagatgagggccctgttgctgaacaagtaaagaaatcaacgttgaaccctaatgctaaggagttcaatcctacaaagcctctgctgtctgtgaataaatccaccagtaccccaacttctccggggccccggactcattcaactccctccatcccggtgctgacagcaggccagagtgggctatacagcccccagtacatctcctacatacctcagatccacatgggaccagctgtgcaggcacctcagatgtatccatatcctgtatccaattcagtgcctgggcagcagggcaagtaccggggagcaaaaggctcccttcctccgcagcgctcggaccaacaccagccagcctcagccccgccgatgatgcaggccgccgcggctgctggcccgcctctggtggctgccacgccctattcttcctacatcccctacaaccctcagcagttcccaggccagccagccatgatgcagcccatggcccactacccctcacagccggtgtttgcccccatgcttcagagcaacccacgcatgctgacgtcgggcagccatccccaggccatcgtgtcatcctctacccctcagtacccttctgcagagcagcctaccccccaagccctttatgccactgttcaccagtcctacccacaccatgccacacagctccatgcccaccagccgcagccggctaccacgcctactggaagccagccgcagtcccagcatgcggcccccagtcctgtccagcatcaggcggggcaggccccacacttgggcagtggacagccacagcagaatctgtaccacccaggggccctgacaggcacgccgccctctctgccaccgggaccttctgcccagtcccctcagagcagcttcccccagccagccgctgtgtatgccatccaccaccagcagctgccccacggcttcaccaacatggcccatgttacccaggcccatgtccaaactggaatcacagcagccccgccccctcaccctggggctccccacccgccccaggtgatgctgctgcacccaccccagagtcatggggggcccccccaaggcgcggtgccccagagtggggtgcctgcactctcagcttccacaccctcaccctacccctacatcggacacccccaaggtgagcagcctggccaggcgcctggatttccaggaggagccgatgacaggattcgtgagttctcattagctgggggaatttggcatggaagagctgaggggctgcaggtggggcaggatgcacgggttctgggtggggagtgaggggtcttggaggcagggctgtcccacagggcgcccgccgacctgcacctgtctgtgaagtatgtagggtgggcagaagccacagtcgccgccgccaggggcttgctcctggctctgtcctttgcttccctccgtcctcgctcagttgtgatccagcagcccccctccccactgcctccccagctctcagtgaccccgactgtctcctgacttagccgaggtaaggtcagtgcagcagacagggccagactggggtgtggggggctgagctgggcacatgagtgagggctctggcttactgggaaacagcgattgacctgtgcttctgacagcccccgagacaccttgaggaggccgctccttcccagacacacccccacgcccccactggacggcattggaggaagggacagctgcttgggttctaatgctcctgctctcttctctttcccctccaaccagttcaatctcatccctcccagcagctccccttccaccccccggggaactgaagattgtcctggccgcgacctgagacctccatgagtggagggaagagtgatctatgtctcttcccccagcagctcggaccactcccagccccccatccccccgttccccaggggagctggggaattcctgccaagcaccttgaatgggaggggcctcacagagggcagggccagggtccagcaggggtggggggttcctgctctgcccctgcccgtccccacccagtcttgccctcccatcctctcatctattcccccgctggagacggaagatcttttattttctattatttataacttcagacttgggccccctgttctttctttcccattaacttgagtgacctgtgtgagagacagacagatgccccacgaggatggctggacaaggacttttactttttattacataaaaatattaaaaaataaataaaaaaaataaaattttaaactaacttaaaaaaaaaaaaaaa

SEQ ID NO: 141 - protein, 1075 aa, Homo sapiens
MLKPQPLQQPSQPQQPPPTQQAVARRPPGGTSPPNGGLPGPLATSAAPPGPPAAASPCLGPVAAAGSGLRRGAEGILAPQPPPPQQHQERPGAAAIGSARGQSTGKGPPQSPVFEGVYNNSRMLHFLTAVVGSTCDVKVKNGTTYEGIFKTLSSKFELAVDAVHRKASEPAGGPRREDIVDTMVFKPSDVMLVHFRNVDFNYATKDKFTDSAIAMNSKVNGEHKEKVLQRWEGGDSNSDDYDLESDMSNGWDPNEMFKFNEENYGVKTTYDSSLSSYTVPLEKDNSEEFRQRELRAAQLAREIESSPQYRLRIAMENDDGRTEEEKHSAVQRQGSGRESPSLASREGKYIPLPQRVREGPRGGVRCSSSRGGRPGLSSLPPRGPHHLDNSSPGPGSEARGINGGPSRMSPKAQRPLRGAKTLSSPSNRPSGETSVPPPPAVGRMYPPRSPKSAAPAPISASCPEPPIGSAVPTSSASIPVTSSVSDPGVGSISPASPKISLAPTDVKELSTKEPGRTLEPQELARIAGKVPGLQNEQKRFQLEELRKFGAQFKLQPSSSPENSLDPFPPRILKEEPKGKEKEVDGLLTSEPMGSPVSSKTESVSDKEDKPPLAPSGGTEGPEQPPPPCPSQTGSPPVGLIKGEDKDEGPVAEQVKKSTLNPNAKEFNPTKPLLSVNKSTSTPTSPGPRTHSTPSIPVLTAGQSGLYSPQYISYIPQIHMGPAVQAPQMYPYPVSNSVPGQQGKYRGAKGSLPPQRSDQHQPASAPPMMQAAAAAGPPLVAATPYSSYIPYNPQQFPGQPAMMQPMAHYPSQPVFAPMLQSNPRMLTSGSHPQAIVSSSTPQYPSAEQPTPQALYATVHQSYPHHATQLHAHQPQPATTPTGSQPQSQHAAPSPVQHQAGQAPHLGSGQPQQNLYHPGALTGTPPSLPPGPSAQSPQSSFPQPAAVYAIHHQQLPHGFTNMAHVTQAHVQTGITAAPPPHPGAPHPPQVMLLHPPQSHGGPPQGAVPQSGVPALSASTPSPYPYIGHPQGEQPGQAPGFPGGADDRIREFSLAGGIWHGRAEGLQVGQDARVLGGE

SEQ ID NO: 142 - DNA, 103 bp, Homo sapiens
aatgggtcccatattcaacatctgctagtctgtatattcgtcctacattcattggaactgagccttctcttggagtcaagaagcctaccaaagccctgctctt

SEQ ID NO: 143 - DNA, 9314 bp, Homo sapiens
gcaatccagcccgccacgtgtactcgccgccgcctcgggcactgccccaggtcttgctgcagccgggaccgcgctctgcagccgcagacccggtccacacggccaggggctacgacccttgggatctgccctccgctcagctcgagcttccctcgtggccgacggaacaatgaaggattgcagtaacggatgctccgcagagtgtaccggagaaggaggatcaaaagaggtggtggggacttttaaggctaaagacctaatagtcacaccagctaccattttaaaggaaaaaccagaccccaataatctggtttttggaactgtgttcacggatcatatgctgacggtggagtggtcctcagagtttggatgggagaaacctcatatcaagcctcttcagaacctgtcattgcaccctggctcatcagctttgcactatgcagtggaattatttgaaggattgaaggcatttcgaggagtagataataaaattcgactgtttcagccaaacctcaacatggatagaatgtatcgctctgctgtgagggcaactctgccggtatttgacaaagaagagctcttagagtgtattcaacagcttgtgaaattggatcaagaatgggtcccatattcaacatctgctagtctgtatattcgtcctacattcattggaactgagccttctcttggagtcaagaagcctaccaaagccctgctctttgtactcttgagcccagtgggaccttatttttcaagtggaacctttaatccagtgtccctgtgggccaatcccaagtatgtaagagcctggaaaggtggaactggggactgcaagatgggagggaattacggctcatctctttttgcccaatgtgaagcagtagataatgggtgtcagcaggtcctgtggctctatggagaggaccatcagatcactgaagtgggaactatgaatctttttctttactggataaatgaagatggagaagaagaactggcaactcctccactagatggcatcattcttccaggagtgacaaggcggtgcattctggacctggcacatcagtggggtgaatttaaggtgtcagagagatacctcaccatggatgacttgacaacagccctggaggggaacagagtgagagagatgtttggctctggtacagcctgtgttgtttgcccagtttctgatatactgtacaaaggcgagacaatacacattccaactatggagaatggtcctaagctggcaagccgcatcttgagcaaattaactgatatccagtatggaagagaagagagcgactggacaattgtgctatcctgaatggaaaatagaggatacaatggaaaatagaggataccaactgtatgctactgggacagactgttgcatttgaattgtgatagatttctttggctacctgtgcataatgtagtttgtagtatcaatgtgttacaagagtgattgtttcttcatgccagagaaaatgaattgcaatcatcaaatggtgtttcataacttggtagtagtaacttaccttaccttacctagaaaaacattaatgtaagccatataacatgggattttcctcaatgattttagtgcctccttttgtacttcactcagatactaaatagtagtttattctttaatataagttacattctgctcctcaaacaaatgcaattttttgtgtgtgtttgaaagctaatttgagaaaatttcataggttacatttcctgcagcctatctttatccacagaaagtgttttcttttttttaaatcaagacttttaaaactggatttcctcccatcactgttttttgaaggtcctccaagtccgtgttaaggtaaatatctgttttcttcctgatgtcacagcctgagcatactctgtgcattaggaagacctgagtgcatttcccaccattgtcctttccacattatgttgtagctggctggctgtcaggcgactacaagactgagggtcttgtgccttatagatctttgtatcccccatggctgacatatagtaggtactcagtaaatggttttataatgaatcagtgaacattttgcttctatagaagtgtaccttctttgtttctatattatgaaacctctttattagaatttgtgattgattctgacagtgtatagatttaccttatattgtctttattttccatgagctactaagtcattagagatactctgaagcatagttagtttaggaaatcacttcatattgattgtattagaattatcttggaattgaagatatatccctagagcaggggaccccaacccccaggccatgggccacacagcaggaagaggtgagtggtgggccattgaggagcttcatctgtatttatggctacttcccatcactcgaattaccacctgaactccacctcttgtcagctcagtggcagcattagattctcataggagcacaaatcctattgtgaactctgcatgcaagggatctaggctatgcgctccttatgagaatctaatgcttgatgacctgaggtgtaacagtttcatcctgaaaccacccttcaccctgcagtctgtggaaaaattgtcttccacaaaactggtccctggtgccaaaaatgttggggaccactgctctagagagaggtcatgatatcataccaaccaaatggaaatgacaaatgttttatgtcaagtgttaattgcagaaataaatcttttttttttttttttggtagaaaacaaagaggcatactctgatttttatactctgtttttgcaggtgctcttttctttgaatggagatttgatgagcaagtggttaggatgcagggagagctactatgggtgatattttccttgtttaggagctgtgagttaaaattgtatcctttgtggtttatctaaggaaagtcaaatcttgacagaaaacatttttccttggaaggtcaactctcagacattgtattttggtttccctcagtcctcataacttccttcttgctgaacatattttattctcttttcagagaaggaaaataaaaaggattctaaaagtttgatgcattggaaaaatttccttgaggcatttagcaacacatagaaaatgggctttgattcttttccaaaacttttagccatagggtcttttatagacagggatagtaaaatgaaaattgagaaatataagatgaaaaggaatgataaaaatatcttttagggggcttttaattggtgatctgaaatcttgggagaagctgttcttttcaggcctgaggtgctcttgactgtcgcctgcgcactgtgtaccccgagcaacattctaagggtgtgctttcgccttggctaactcctttgacctcattcttcatatagtagtctaggaaaaagttgcaggtaatttaaactgtctagtggtacatagtaactaaatttctattcctatgagaaatgagaattatttatttgccatcaacacattttatactttgcatctccaaatttattgtggcgagacttgtccattgtgaaagttagagaacattatgtttgtatcatttctttcataaaacctcaagagcatttttaagcccttttcatcagacccagtgaaaactaaggatagatgtttaaaaactggaggtctcctgataaggagaacacaatccaccattgtcatttaagtaataagacaggaaattgaccttgacgctttcttgttaaatagatttaacaggaacatctgcacatcttttttccttgtgcactatttgtttaattgcagtggattaatacagcaagagtgccacattataactaggcaattatccattcttcaagacttagttattgtcacactaattgatcgtttaaggcataagatggtctagcattaggaacatgtgaagctaatctgctcaaaaagatcaacaaattaatattgttgctgatatttgcataattggctgcaattatttaatgtttaattgggttgatcaaatgagattcagcaattcacaagtgcattaatataaacagaactggtggcacttaaaatgataatgattaacttatattgcatgttctcttcctttcacttttttcagtttctacatttcagaccgagcttgtcagcttttttgaaaacacatcagtagaaaccaagattttaaaatgaagtgtcaagacaaaggcaaaacctgagcagttcctaaaaagatttgctgttagaaattttctttgtggcagtcatttattaaggattcaactcgtgatacaccaaaagaagagttgacttcagagatgtgttccatgctctctagcacaggaatgaataaatttataacacctgctttagcctttgttttcaaaagcacaaaggaaaagtgaaagggaaagagaaacaagtgactgagaagtcttgttaaggaatcaggttttttctacctggtaaacattctctattcttttctcaaaagattgctgtaagaaaaaatgtaagacaaaaaaaaaaaaaaaaaacaaacagaggcagaggcaggcagtagcaagaaagcagagcgtaacatcagctagatggtaacatgcaatgtcagctctcttgaagacatgggaaacctaagttacaccttgggttaaaattcttcaccatattagttttgttgcttcataaaatttacctaagcaagtggtcttgcttgcctcaaatccaagcagtcttgaacacttggaggcaattaatgagtatatcttagtcaaaagaattgttggagctttttattaaagctacagtttcagttctgcttttggggaattgtgctatgaaagcagctgccaaaataagctcatttattttcttcaatcccactcagtgctcagtcactatattctgtttcctttttttttttcaagttgcatatttggtttccccttatgattgggaaagatgaattttcagcagaaaacattgtttgttcactttcaaagagtgatagtttctaaaacatttagagcaataaatattcatcagaggtaccaagtaagccggcagaagagttaagggttagagaaatcccttatttcatgtcttgactctaaaattatcaaagtacttttccttgtaatgtggatttcttcttatgcggatatgcaaaaacttcagttatacgtagtaatgctagcaggtaattttagtagacattttataacaactgtcactttgtttcgccacatgtagagtttgttcagctattttccagatatctccccacaaaaggaggcaaagggtaccagcttttcaatgagcattacctattacttggcaaagatgatgaagactctattaatagttcatttgataaatgttgacataaccaacaatagagattaggaagttagttttaagaaatcaatggcatatagacattaccctcatggagtttgtattctactacttgaactgattgtagctataaaagcatagttagatagctgaatagttagatcataagcaaagaaggccagaacacatctcttatcaagaaatcaatgaatagtttatctcatttttaaagcaactttatccttctttaattccttcctttcttctagtgcaaaactacttaataaggttggtgtttaggttagtgttcacaccattcctcatctggtgtgaattaccttctctttctttactatttactaccaacctagtacatgtgttgactgaattcttttcaaacaatgttgagttatcatggtgcacctaataaattaacaccacagattacagcatccttgctgattttctcagcaaagccagattagatggaaataaacaaagaaaatgatcctagagtgaatttttctagaaaatatctattatgaaccatgctgtttaaagtattagcttgaaggtgatggatccagctattcagaaaataactttcatataaccatgattttgcacagtatgaggtcttaaatgtgtggaaagagataaattttttatcattaccacaaaccccttttaaagattcaaaggtggaagaaagtgatttattttttctcttcagcatacatatataaaagacttgtcagatgtttaatttggggaggttgataatgaaacatatcaacagagtatagtagttatagtagtgtttgtgggtaaataatttcctggggtcagacatatataaacatatttgcttcaaaatgataaaggcatgaaatcagtcttaaaaattgaaatgggggtgatgggggagaaaaagaagaacaaatttgaagtgccctttcaaatctgctggatacaagtattgaagttttaagtcatcttattctgtctgaaagtgtatttttcattctacaatagacccaatcaacaagacgtataacttgagttgcatgatgttcagtttatgtaatctactgttgggatggtaagaattgatgtaggctgtggtgtaagaatgaattaaaatatagtttcactggcttttctctacatatccactatcacaatggctaggtttcctgttgctcactattggattctggagaaaaatttaatgaaagatgatatcagaggaagaataagtggaggtagagaagaaaggaatgatagaggaggggaaaaaaacaaaacatatttttgtgttatccaaaggagctttttccttattctgtcaagcattgagatcttcttcagctttcaatgtagttgctaaatacaaataatgctactaggtagtgactaaatatagcaaacacttcatcagatattagaattaggtcacactattgaggttataatctgaaggttgtgttacatagaaaccactttagattattatcaacttggactaggctttattttataatagcatagtaagtaatatctattgtgtcatttcttcaaccattttattctaagatccatgaagcttcttgaggccaaataaaataataagtttagacaagaagtagattgtgacttttttcccttagagatactatttactatctcctatcctgataggtggaaggtttactgaattggaaattggttgactattagtttttaactaaaatgtgcaataacacattgcagtttcctcaaactagtttcctatgatcattaaactcattctcagggttaagaaaggaatgtaaatttctgcctcaatttgtacttcatcaataagtttttgaagagtgcagatttttagtcaggtcttaaaaataaactcacaaatctggatgcatttctaaattctgcaaatgtttcctggggtgacttaacaaggaataatcccacaatatacctagctacctaatacatggagctggggctcaacccactgtttttaaggatttgcgcttacttgtggctgaggaaaaataagtagttcgaggaagtagtttttaaatgtgagcttatagatagaaacagaatatcaacttaattatgaaattgttagaacctgttctcttgtatctgaatctgattgcaattactattgtactgatagactccagccattgcaagtctcagatatcttagctgtgtagtgattcttgaaattctttttaagaaaaattgagtagaaagaaataaaccctttgtaaatgaggcttggcttttgtgaaagatcatccgcaggctatgttaaaaggattttagctcactaaaagtgtaataatggaaatgtggaaaatatcgtaggtaaaggaaactacctcatgctctgaaggttttgtagaagcacaattaaacatctaaaatggctttgttacaccagagccatctggtgtgaagaactctatatttgtatgttgagagggcatggaataattgtattttgctggcaatagacacattctttattatttgcagattcctcatcaaatctgtaattatgcacagtttctgttatcaataaaacaaaagaatcctgtttgtgtggtttcatgaaatcagcattgttgaatgcatgaagtaataatgctaaattaacatttttatgatgtctcaaggtttctggtcaagggaagtaaatgtaggatagtatttttacaccaaaatgacacagagagaattgagcacaccagaaagaccagaaaccacaccactggatagagattcaatatgtttctttttcaaacatttggacaagaaaaaaatgggcatttaaaaattcttccttcccctggttatggatttatctgtagtaaaacttagctttgtcgtttgagatttgcacagaatggggggagtagattacctcttcccattcattgtcataatggatctacatcactgataaacaccatacttctatatgtggttaactagctttagaataaaagacactttaaaaagtaaaaggcctagagatcttcaatgaagtgtcccttttagccaaaccaggccttgcagaaattgtcctcaaaagcaccaagggagaacaaagccaagtgcagaattacccaagggtcacacattttgtattcattttcttataatttgcccaaatgatttgaagtacagcaaaacctgaagttttgcaaagagttactgtaaactgaacttaaaaatgtcagagtgctcggtgacccacttctccagaccctgtcaacctgtgaaaatattggcctttattcagatctctcaagaagttacgcgcagagtttggaaggtctaggcaaaggttattagtcaagtgttcttacagtgtcaacgctcaattcccacaagcgtgagaaagagagacctgtcattcctgagggtgatgacatacatttactggagcttatataatttatcagataagacagcagtttccttcagggtagaaagtgtgttttctacattgatttagtacaaaacaaaaagaaaaggggatatttcaaattttataattatttttctgctaagctgattcagtgtgatttaagcatatttttcaaatcatgaatctgattccatatacatatgtgccttatattgtgataatttatttttaagtgaaatatgctatcatagcctgactttatgtatagtggtgacaacttgcaggatcgcatttctgtaaccaaacggccgacagctgaggtgtagatgcttcctatggtctgtagaataatcactgggcttgttctctagctatgtctgtatgcaatcgcgacagtgttgatcaaaacccatgatcattctctccaaaggtctttgtcactaagccactagggattctgaaaagttcgtgagctgaaacaaataaattgagttggaagatt

SEQ ID NO: 144 - protein, 386 aa, Homo sapiens
MKDCSNGCSAECTGEGGSKEVVGTFKAKDLIVTPATILKEKPDPNNLVFGTVFTDHMLTVEWSSEFGWEKPHIKPLQNLSLHPGSSALHYAVELFEGLKAFRGVDNKIRLFQPNLNMDRMYRSAVRATLPVFDKEELLECIQQLVKLDQEWVPYSTSASLYIRPTFIGTEPSLGVKKPTKALLFVLLSPVGPYFSSGTFNPVSLWANPKYVRAWKGGTGDCKMGGNYGSSLFAQCEAVDNGCQQVLWLYGEDHQITEVGTMNLFLYWINEDGEEELATPPLDGIILPGVTRRCILDLAHQWGEFKVSERYLTMDDLTTALEGNRVREMFGSGTACVVCPVSDILYKGETIHIPTMENGPKLASRILSKLTDIQYGREESDWTIVLS

SEQ ID NO: 145 - DNA, 109 bp, Homo sapiens
gaccatcgccacctcagacgacgagctgctgcccgaccggcccctgctgccccccccaccaccaccgcagggctccgggccagggatcagcaacagccagcccagccag

SEQ ID NO: 146 - DNA, 9643 bp, Homo sapiens
agaagagcccagctgcagccccggggccccgccaggcctctcgctgcccgcccgggcctgctgggatgggcacgggctaggcctcgagctggggacggggcggggcgtggccccaaccccgggccccctccacggctggagcgctctgggggtggggcacgaggggtaccccaccctgggtgaggggcgcgtctgggagcaggaatccctcagggggccaggggagacctcacagccgccccacacggcacctttgctacctagccttttagtgaattctgtctctgccgcccgtcggggcggaggcttgctggagactgcaagccccctgagggcaaggtgcgggagggatggggacagggctggcctccaggatcgagaccccatctcgtaatcctctttttccagtgccaccccaccctatccagctccctagtcccagggctgttgggtcctcccttctcccctccccctctgacaccccctccccaagtcacgagttttctctttggggcttgttgctgcagtccgtgctccagtaccgagtacctggctgggccctgggcacgcacaggggccgtagccccactgtgtgtgggagccatgaggatcctggctaacaagacaaggttaccccaccccaggaggagagaagctccagggagcccgccgctgtccccccgcggtcattgcccccctgccccagccaagccaatgcacccagaaaataaattgaccaatcatggcaagacagggaatggcggggcccaatctcagcaccagaatgtgaaccaaggacccacctgcaacgtgggctcgaagggcgtgggggcggggaaccatggggccaaggccaaccagatctcgcctagcaactcaagtctgaagaacccccaggcaggggtgccccctttcagctcgctcaagggcaaggtgaagagggaccggagtgtgtctgtggactctggagagcagcgagaggctgggaccccatccctggattcagaggccaaagaggtggcgccgcggagtaagcggcgctgtgtgctggagcggaagcagccgtacagtggggacgaatggtgctctggaccggacagtgaggaggacgacaagcccattggggccacccacaattgtaatgtagcagacccagccatggcggccccacagctgggtcccggccaaaccacccaactgcccctcagcgagagcagcgtgccaggcgccccgcacggccctcctcctggccttcggcctgatgcccctgggggcgggggcgggggcgggggcgtccccggaaagcctccctcgcagttcgtatatgtcttcaccacccacctggccaacacggctgcagaggcagtgctgcagggccgggccgactccatcctcgcctaccaccagcagaacgtgccccgggccaagcttgaccaggcccctaaagtgccccccaccccagaaccgctacccctgagcacgccgtcagcaggcaccccgcagtcccagccacctccactgccgccgccgccacccccggcccctggcagtgccccgcctgctctgcccccagaggggcctcctgaggacagcagtcaggacctggcccccaactcggtgggagctgccagcacaggtggtgggactgggggcacccaccctaacaccccgacggctaccaccgccaacaaccctctgcctcctggaggagaccccagcagtgcccccggccctgccctgctgggggaggcagccgcccctggaaatgggcagcgcagcctggtgggctcagagggcttgtccaaagagcagctggagcatcgggaacggtccctccagacgctgcgagacattgagcgactgctgctccgcagcggagagactgagcccttcctcaaggggcccccaggaggagcgggtgaggggggcccaccagcacaagccccccctcccccccagcagccacccacggcccctcccagcgggctgaagaaatatgaggaacccttgcagtccatgatttcacagacacagagcctagggggccccccgctggagcatgaagtgcctgggcaccccccgggtggggacatggggcagcagatgaacatgatgatacagaggctgggccaggacagcctcacgcctgagcaggtggcctggcgcaagctgcaggaggagtactacgaagagaaacggcggaaagaggaacagattgggctgcatgggagccgtcctctgcaggacatgatgggcatggggggcatgatggtgagggggcccccgcctccttaccacagcaagcctggggatcagtggccacctggaatgggtgcgcagctgcgggggcccatggatgttcaagatcccatgcagctccggggcggacctccctttcctgggccccgtttcccaggcaaccagatacaacgggtacctgggtttgggggcatgcagagtatgcccatggaggtgcccatgaatgccatgcagaggcccgtgagaccaggcatgggctggaccgaagacttgccccctatggggggacccagcaattttgcccagaacaccatgccctacccaggtgggcagggtgaggcggagcgattcatgactccccgggtccgtgaggagctgctgcggcaccagctgctggagaagcggtcgatgggcatgcagcgccccctgggcatggcaggcagtggcatgggacagagcatggagatggagcggatgatgcaggcgcaccgacagatggatcctgccatgtttcccgggcagatggctggtggtgagggcctggcgggcactcccatgggcatggagtttggtggaggccggggcctcctgagccctcccatggggcagtctgggctgagggaggtggacccacccatggggccaggcaacctcaacatgaacatgaatgtcaacatgaacatgaacatgaacctgaacgtgcagatgaccccgcagcagcagatgctgatgtcgcagaagatgcggggccctggggacttgatggggccccagggcctcagtcctgaggagatggcccgggttcgggcccagaacagcagtggcgtgatgggcggcccgcagaagatgctgatgccttcacagtttcccaaccagggccagcagggattctctggaggccagggaccctaccaagccatgtcccaggacatgggcaatacccaagacatgttcagccctgatcagagctcaatgcccatgagcaacgtgggcaccacccggctcagccacatgcctctgccccctgcgtccaatcctcctgggaccgtgcattcagccccaaaccgggggctaggcaggcggccttcggacctcaccatcagtattaatcagatgggctcaccgggcatggggcacttgaagtcgcccacccttagccaggtgcactcacccctggtcacctcgccctctgccaacctcaagtcaccccagactccctcacagatggtgcccttgccttctgccaacccgccaggacctctcaagtcgccccaggtcctcggctcctccctcagtgtccgttcacccactggctcgcccagcaggctcaagtctccttccatggcggtgccttctccaggctgggttgcctcacctaagacggccatgcccagcccgggggtctcccagaacaagcagccgcctctcaacatgaactcttccaccaccctgagcaacatggaacagggtaccctcccgcctagcggcccccggagcagctcctcagcacctcccgccaaccctcccagcggcctcatgaaccccagcctaccattcacttcctccccagaccccacaccttcccagaaccccctgtcactgatgatgacccagatgtccaagtacgccatgcccagctccaccccgctctaccacaatgccatcaagaccatcgccacctcagacgacgagctgctgcccgaccggcccctgctgccccccccaccaccaccgcagggctccgggccagggatcagcaacagccagcccagccagatgcacctgaactcagccgctgcccagagccctatgggcatgaacctgccaggccagcagcccctgtcccatgagcccccgcccgccatgctgccctcccccacccctctgggctccaacattccactgcatcccaacgcacaggggacaggggggccccctcaaaactccatgatgatggccccagggggccccgactccctgaatgccccctgtggcccagtgcccagctcctcccagatgatgcccttcccccctcggctgcagcagccccatggtgccatggcccccactgggggtgggggcggggggcctggcctgcagcagcactacccgtcaggcatggccctgcctcccgaggacctgcccaaccagccgccaggccccatgcctccccagcagcacctgatgggcaaagccatggctgggcgcatgggcgacgcatacccaccgggtgtgctccctggggtggcatcagtgctgaacgaccccgagctgagcgaggtgatccggcccaccccaacggggatccccgagttcgacttgtcgaggatcatcccctctgagaagccaagcagcaccctccagtacttccccaagagcgagaaccagccccccaaggctcagccccctaatctgcatctcatgaacctgcagaacatgatggcggagcagactccctctcggcctcccaacctcccaggccagcagggcgtccagcgggggctcaacatgtccatgtgccaccctggacagatgtccttgctgggcaggacaggcgtgcccccacagcaggggatggtgccccatggcctgcaccagggggtcatgtcccctccacaaggcctcatgacccagcagaatttcatgctgatgaagcagcggggcgtggggggcgaggtctacagccagccgccccacatgctctccccgcagggctccctcatgggccccccgccccagcagaacctcatggtgtcccacccccttcggcagcgcagtgtgtccctggacagccagatgggctacctcccggcaccaggcggcatggccaacctgcccttctagaagtcgctgccagggctggagccggggcaatgttgcaaatacgataaccttaacaaagttcttcccctcaatgttgggatggcctgggtcgcggggtggggtggagggggtgggagggggcttgtgtagggagtggcatttgtggaaaccagatgtgctggcagcttagggggaagtggcagtgtggggtgggggattttgcattggggttggttccatttcggccaccaggactgcccctcccccactcctcccaattcctatggagcctctctattttacctctttccgtgcatccctgcacccgccacacccccttcagctatgcttttggagtcctggatgggaatctggggggagagaggaaggacaggtcaggtctcccccagccccttctgctcctgtctcctcgtgtccgcattgctggagctccacctccctcttggtttctccgcacccgcccattttccttctgtctttacctgcttcgtatcctttccctgctgatgtggctgacccctctcccacccctccctgcaggcggctggccaggtgggcaggtgccagccggagctgtaaatagagcgctgcgcttttgtgctggtttgtgcgtgtgctgtatttctgtgttttgatagaagtcacacaaaaaaaaaaggataaaagaaacccttccccccttcttcaagttattgctccctccattcccctggacccagggacatgcagccctacatggccacccactgtttgcagtgtctctgggtccctaagggataccattcctgtctcgtccccaaatggtaagatgacgtaaatgacccactcctaaactgaggtcagaccacctaggcttccacctggtgagccctagcagggctgagacccccagggcggcagcctgtctgctgctgagtgattcagggagaacatgtgtgcacgtgcatgtgtgtttgcccacaccggtgacacggggccctggctttccactttggatgcccgggcatccgctgctgctacatcttagccagaacttgaagtcttttgtcccagtttgggatgaaggaaaggaggaagaggcggtggctgtgtggcccccttgagtggagccatggaaggggtggcatggtgccactggggcctgtggctgtagtagccctgggccaggtaacctccagggccctgacttttccagaggctgctgccacctacttcttatcaaagaagggggagaacagttcatctgagtcagtgcacctcccctccagtctccactccctgaggatggaatcggggaaacagcatcctgccgcctcctctctgcctgcccactcaccggcaaggttgtccctctgcccagggctcagggccatgtaccagatctgtctgtgcccacccaggcacagccactgcctcccccttggctccctgctcctacccaggagagctccctatccgcctttggtcagagctgaagccatatacgactgggtgtttgtccccctactttggccccaggagtaaaaaaacttctccttttctcacttcctttcctgcctcgggaggtggcagggcagttccctggctgaggccttttgcgccccacctccaggaccaagggccattctagacagggtgtcttctaccaggacccgtccctagccttcctggcctggagggcctggtcttgcactggcagctgtaatacaaagggaactcgccccacttctcccagcctggtgctgtcctctcggcccaccatcggccaggtccagcgcttcctctggggctgacaacaggcccctgactcaccccggtcacctcccagggtccatggccagggcctctgtgtttggggggccacttgcccttcatcctgccaggcgctttgcccgccctgcctcagcctgggccctgtgcccttgagccctccacccctggcccaagacccccccaaactgtctgactctgtgtttcctgccctgaggagagaggggtcagattgcagcgggccgagtgccctctccgtcccctctcctcccacccacgccacaggccagcctactcttccctccatccatggccacacccccagccattttgtaccattatataaatatatatataaatataaatatataaatacaatatgtgaagacatcttcttggtttttattttgaaacaatttttaggcttgttccgggggtctctgtgctgcctgtactgtattgacctgttttataggtgcctttttattaaaaagaaaattcaaaatccagcctcttgcctctttgcatctgcttcagactcccccatcgattacccagcttgcgaggagatactcagagaaaaaagggacgtcttagggcttcctcgttgtcctgccgtgaagacactctcacgtgagccacagctgttatttccccagtggggcctcccaaggagcttggctgcttggcttgagtgggacaagggcaggggtccctgactccccacctgatcaaaggctggggaggtggtagggagcacccagaactgccggacgggcctcccacaccccaggtgagcaaacaagcacggagcagcttcctgcggttccatctgagtgacatcctcacgggggcagggcacggcttcctggggcctggggacttccctgcctcagtgtgtttcttacacttccctgcctaaggtgatgccacggaggggatggttgagatgactcccacgggccccttccagtccacctttctccgttccgactctgagtttcctcgggtctatagcttatgggaagggagtgaggaggggacaagccagcctccttccccatcaatgcccacaacctcccatcccctggacccagccaccctaggagttctccaccccaccccatctcgcctggcggaggggaccgccgggtttgattgatccatctccctccttggggttcgggaagaaagctcttttcttccctctgtcgggtttctttcttgcttctcggccttcacgcttcctcaggtcactggctggcctccaagggcacctagagtcagccctgcctgcagaccacccaggatccggtgacatggggtggacccagcgctgtttcggtcagagccaggggcagctacctgaactcaaccagtctgagcttcctgcttggtcaagatgactgcaggcttgggggcctggcagaatgtctgtgtttttagggactgagttgtccgaaggccacactctgctgccagctggcctttcctcagccttaacctccactcatcccctggtgctcagcttctggctttgtttgacaggtgggcaggaggagagaggggaagctgtggaggtcagcagcccctaagctgatggagtgtgttctgggaggggcaggcgctctccgttggcaagggcagaagtagaagttgtttcttgagcattggatgattaggatgggaggtgcgtgaggttctctcagcccaggggggtgcagatgggtaaggacagccttcactgtgcctttgagctgctttccgctccctgggctccagcctagccccagggccggcagaagagctggcagggatgttctagaaatgggggttggttcctctagctaccccaaatgaggatactcctaggacactcttagccacggtgagcccttaggatcccagctcctgttggaaggagcatccagcatcactgcctgccccaaggaaaagcagcaataaaaggggacactgggacctagaacgtggtgagagaggtggcattctctgactcagagagactgctcctgcgccagctagggaagagctggcacagggaggcagggccggtacagcccagcttcgtcaggagccgcgacaggtcactgcggaacttcacgccggcgaaagtgtagagcatggggttgaggcagcagtgggccaggcccaggaactcacacatggtgatggccacggggagagagccattcagcttgcaggtattgtccacggccttcagcctcgccagggtgtccaggaagatgacgatgtggtagggtgaccagcagaggaagaagatgcttgtcaccaggatggccaccctgactgccttctgccgctgagggcgccgctgggcctggcgcaacctgtgcactacccccacgtagcaccagcccatcaccagcatgggcagcaggaatcccgccacatggtagaggaatcgggaggtgaaccaggcatgcgtttctgcttggttctcttgggagaaggtgcaacgtggcagggagttgttgtgatggccttggctgactttggcgaagagaatctctggcaaggcaaggaggaagcccaccagccagatggtcccacaggtgatgtggatggagaggaggcggcggtggcggtaggcatggacggcgtggacaatggccaggtagcggtccacggcgatgcaggccaggagcaggctgctgcagtagaagttgactttgtgcagggcaatcacagttttgcagaggaaggtccccaggacccagcccacagagcc

SEQ ID NO: 147 - protein, 1499 aa, Homo sapiens
MRILANKTRLPHPRRREAPGSPPLSPRGHCPPAPAKPMHPENKLTNHGKTGNGGAQSQHQNVNQGPTCNVGSKGVGAGNHGAKANQISPSNSSLKNPQAGVPPFSSLKGKVKRDRSVSVDSGEQREAGTPSLDSEAKEVAPRSKRRCVLERKQPYSGDEWCSGPDSEEDDKPIGATHNCNVADPAMAAPQLGPGQTTQLPLSESSVPGAPHGPPPGLRPDAPGGGGGGGGVPGKPPSQFVYVFTTHLANTAAEAVLQGRADSILAYHQQNVPRAKLDQAPKVPPTPEPLPLSTPSAGTPQSQPPPLPPPPPPAPGSAPPALPPEGPPEDSSQDLAPNSVGAASTGGGTGGTHPNTPTATTANNPLPPGGDPSSAPGPALLGEAAAPGNGQRSLVGSEGLSKEQLEHRERSLQTLRDIERLLLRSGETEPFLKGPPGGAGEGGPPAQAPPPPQQPPTAPPSGLKKYEEPLQSMISQTQSLGGPPLEHEVPGHPPGGDMGQQMNMMIQRLGQDSLTPEQVAWRKLQEEYYEEKRRKEEQIGLHGSRPLQDMMGMGGMMVRGPPPPYHSKPGDQWPPGMGAQLRGPMDVQDPMQLRGGPPFPGPRFPGNQIQRVPGFGGMQSMPMEVPMNAMQRPVRPGMGWTEDLPPMGGPSNFAQNTMPYPGGQGEAERFMTPRVREELLRHQLLEKRSMGMQRPLGMAGSGMGQSMEMERMMQAHRQMDPAMFPGQMAGGEGLAGTPMGMEFGGGRGLLSPPMGQSGLREVDPPMGPGNLNMNMNVNMNMNMNLNVQMTPQQQMLMSQKMRGPGDLMGPQGLSPEEMARVRAQNSSGVMGGPQKMLMPSQFPNQGQQGFSGGQGPYQAMSQDMGNTQDMFSPDQSSMPMSNVGTTRLSHMPLPPASNPPGTVHSAPNRGLGRRPSDLTISINQMGSPGMGHLKSPTLSQVHSPLVTSPSANLKSPQTPSQMVPLPSANPPGPLKSPQVLGSSLSVRSPTGSPSRLKSPSMAVPSPGWVASPKTAMPSPGVSQNKQPPLNMNSSTTLSNMEQGTLPPSGPRSSSSAPPANPPSGLMNPSLPFTSSPDPTPSQNPLSLMMTQMSKYAMPSSTPLYHNAIKTIATSDDELLPDRPLLPPPPPPQGSGPGISNSQPSQMHLNSAAAQSPMGMNLPGQQPLSHEPPPAMLPSPTPLGSNIPLHPNAQGTGGPPQNSMMMAPGGPDSLNAPCGPVPSSSQMMPFPPRLQQPHGAMAPTGGGGGGPGLQQHYPSGMALPPEDLPNQPPGPMPPQQHLMGKAMAGRMGDAYPPGVLPGVASVLNDPELSEVIRPTPTGIPEFDLSRIIPSEKPSSTLQYFPKSENQPPKAQPPNLHLMNLQNMMAEQTPSRPPNLPGQQGVQRGLNMSMCHPGQMSLLGRTGVPPQQGMVPHGLHQGVMSPPQGLMTQQNFMLMKQRGVGGEVYSQPPHMLSPQGSLMGPPPQQNLMVSHPLRQRSVSLDSQMGYLPAPGGMANLPF

SEQ ID NO: 148 - DNA, 109 bp, Homo sapiens
ttctccgcaccaaggggctcacgagcgagcgacagctgcagaccttcagccagagcctgcaggagctgctggcagaacattataaacatcactggttcccagaaaagcc

SEQ ID NO: 149 - DNA, 4629 bp, Homo sapiens
cgcctctcggagctggaaatgcagctattgagatcttcgaatgctgcggagctggaggcggaggcagctggggaggtccgagcgatgtgaccaggccgccatcgctcgtctcttcctctctcctgccgcctcctgtctcgaaaataacttttttagtctaaagaaagaaagacaaaagtagtcgtccgcccctcacgccctctcttcctctcagccttccgcccggtgaggaagcccggggtggctgctccgccgtcggggccgcgccgccgagccccagccgccccgggccgcccccgcacgccgcccccatgcatcccttctacacccgggccgccaccatgataggcgagatcgccgccgccgtgtccttcatctccaagtttctccgcaccaaggggctcacgagcgagcgacagctgcagaccttcagccagagcctgcaggagctgctggcagaacattataaacatcactggttcccagaaaagccatgcaagggatcgggttaccgttgtattcgcatcaaccataaaatggatcctctgattggacaggcagcacagcggattggactgagcagtcaggagctgttcaggcttctcccaagtgaactcacactctgggttgacccctatgaagtgtcctacagaattggagaggatggctccatctgtgtgctgtatgaagcctcaccagcaggaggtagcactcaaaacagcaccaacgtgcaaatggtagacagccgaatcagctgtaaggaggaacttctcttgggcagaacgagcccttccaaaaactacaatatgatgactgtatcaggttaagatatagtctgtggatggatcatctgatgatgatggataaatttgatttttgctttgggtgggctcctcttggggatggattatggaatttaaaccatgtcacagctgtgaagatctggcacaagatagaatggtaaaaaaaaaaaaaattttaagtgacagtgccatagtttggacagtacctttcaatgattaattttaatagcctgtgagtccaagtaaatgatcactttatttgctagggagggaagtcctagggtggtttcagtttctcccagacatacctaaatttttacatcaatccttttaaagaaaatctgtatttcaaagaatctttctctgcagtaaatctcgcaggggaatttgcactattacacttgaaagttgttattgttaaccttttcggcagcttttaataggaaagttaaacgttttaaacatggtagtactggaaattttacaagacttttacctagcacttaaatatgtataaatgtacataaagacaaactagtaagcatgacctggggaaatggtcagaccttgtattgtgtttttggccttgaaagtagcaagtgaccagaatctgccatggcaacaggctttaaaaaagacccttaaaaagacactgtctcaactgtggtgttagcaccagccagctctctgtacatttgctagcttgtagttttctaagactgagtaaacttcttatttttagaaagtggaggtctggtttgtaactttccttgtacttaattgggtaaaagtcttttccacaaaccaccatctattttgtgaactttgttagtcatcttttatttggtaaattatgaactggtgtaaatttgtacagttcatgtatattgattgtggcaaagttgtacagatttctatattttggatgagaaatttttcttctctctataataaatcgtttcttatcttggcattttaatcaatctcttgtcatgattatagaggtttagctaaaagtattttttcttagaagacaggttctataaactgaatctctgttgcacactggtcatgctggaaaaacatttgatgaggaatgaagatgctctgtatatacatgtttaggttttacaggaaacacaggagtagcatgttttaaaaatttctaaagtcaaaacatggacacattcacaggctaatgatctcatgaaataaggataagagaccacggtagcatctaccaaaaatgtgatactcaaaggattacatttcattgcttccctgttgaagtgaagatataaatgttccattctgacccacctttgaaaaacaattactttgccccatggattctttgttcaattagaaatttccccggggcaggtgacccatagtcttaaagaacaggctaaacaccacagagagattggttgctttttgcttttcatcacctgcaagatgtacataaaaatcacataagctggaattcaacaaaaggtatgtttatgaacttttattctcaaaagttgaaatgctgactttctcgattcctcattttcagacttttatttcagataaatactaaaaacctaagtgaaccttgataatgctgtagtgtagattacttcactaccccatataatagaaggacttgctgtttagttgtagaggataacagcgtttttcagtggaaattgaaagtggaaaaattgaattttgctctacacagttaacatatagtggcctttttttggtatatatgtaaacatgttgacactggaaatacgcagtctgaaataaaattagtaattacttgaaattagtaatctcaaataacttttaagaagttatttctacacccaggaataaattattctgattttgtagacaacacaggaataggccactgaatatgcaggtatttagagtacaaatgtctgtggatattattggcacaccattctcgagagttagaattcgtagacccgcaacacatggactacccttgccaattgttatggttttatttttaaacctattctgtgaaaaagctcctcggtatttcaaacttgaattacaataaaaacaccaggtagggttgtttttaaatgggtctcaccccagtgctgactactgttgtttaccaactacatttcatctggtaactccattgaaactaagtacctcaaccattttttttttttatcataaagccttttttcaaatggaaagttgtttttgaagatcttgacatcagactttttcaatctttgaaaatgatggaaacagttaataaaaatgtttattttagaattcaggtgatgtctggcttgtgaggagctgtttataagtttgtctttgaaaaaggcttgcacacatcactctgagaccagctgtttcctgtgactttaaccttaccttccccagacaattgagctgaacctgtatctgcggtacagtagctgtttgtgatgtatttcttgttcactgtttctggggaatgttttgaaatattttattataaatccttttaagataggatgactactttcaaaattattgttgcctttggcaccaggaattcatagttgtgattggcagtaagtttgaggagtgttactttctaagttttaacaggtagttttgaaattatttccttttttccaaatttaagtagtgcctccctctgtaatgttgaaacaaggcttcaagtggattgtatagcaagagttaccctggttcatgcaggataatgcggctgttatctttgtcatctggaatgggaatctcatgtctttatccttatgtgcaatatttctataataatagactggaaaggccaccagaaagtggctttcaggtacattgcacaaatagtttccttaagtcattataactcacacattgcaagtaattaattttgttttgtataggtgttgcagtttatgaaattggccttcaagttaaaaggaaggaagccgtattcccgatggctagtgtttaatgactacaggtttccaggctccctttaatcttgggagcaaataaatctactattggacttctccctgcgtgacttttaacatttctgatactctctcttcttcctctttacagaagagaggtatgataactgaagttgtactttgcatattgaagtttaaagatacttcctctccccttttcacccctatttcaaatgatgtgataaaatcctcttgataggctatatggagaacatttgtcaatagttttatctatgcatggaagtcttcaaaaagtatatcttggattgtctaaaactgaatagatttcttatttatctgaaggtatacagactgccaacattttagacttatctctcagtctctgccactgaacttttatatatggctgctatcaaaatataaccggtttattttcatatttggaactaatataacagtatcacaaaatcttttacagtaagatagtttgtaataccagccgacccagctgcttaactgagtccttaaatcatttaatatatgggactgtaaatagagaaatctgtacattatgagatctgatttctggttatgcctatagatctttattttctttatccctatagatcattttcttctgatgttaagtgttatatttttgaaatgctcctaaacaagtaagccttagattgtattaatcctgaggattgataccatttcctcaacactttgtggagtatgattgacaccagtttttttttgactgcaggtttaacttggcttatcacttttcgtattgctcagtatgtccaagataggaataaaaaaatgtagttcaa

SEQ ID NO: 150 - protein, 171 aa, Homo sapiens
MHPFYTRAATMIGEIAAAVSFISKFLRTKGLTSERQLQTFSQSLQELLAEHYKHHWFPEKPCKGSGYRCIRINHKMDPLIGQAAQRIGLSSQELFRLLPSELTLWVDPYEVSYRIGEDGSICVLYEASPAGGSTQNSTNVQMVDSRISCKEELLLGRTSPSKNYNMMTVSG

SEQ ID NO: 151 - DNA, 98 bp, Homo sapiens
gggacagccttcagtgacattaatctgcaggagaaggactggactgactatgatgaaaaggcccaggagtctgtgggaatctatgaggtcacccacca

SEQ ID NO: 152 - DNA, 1102 bp, Homo sapiens
acgacgcgccggaaagcaacggcaagggccgcagccagcaccgggcggagagggctaccatggggaaaatcgcgctgcaactcaaagccacgctggagaacatcaccaacctccggcccgtgggcgaggacttccggtggtacctgaagatgaaatgtggcaactgtggtgagatttcggacaagtggcagtacatccggctgatggacagtgtggcactgaaggggggccgtggcagtgcttccatggtccagaagtgcaagctgtgtgcaagagaaaattccatcgagattttaagcagcaccatcaagccttacaatgctgaagacaatgagaacttcaagacaatagtggagtttgagtgccggggccttgaaccagttgatttccagccgcaggctgggtttgctgctgaaggtgtggagtcagggacagccttcagtgacattaatctgcaggagaaggactggactgactatgatgaaaaggcccaggagtctgtgggaatctatgaggtcacccaccagtttgtgaagtgctgatccctcttccttcccagttgcccttaagaactgagaaaggacaaagtactctaagcagcagagcccacagaggctcgttcctttgacccttgtctcctggtggctatacgaaaccttcacaatctgcatgctggactttattacagcttcccaagccccatcaataaagcccctgttcacgctgcactggtgcatgaaggtgaagtaaggaggcagctactccctccacaaataagaattcgtgcagcagcagttcactccttaggaaaatgaagagtatttttaaggagatggtatctccccagtcaagggcaagtttacagagatgaaaccgcgatcccaccatcactcaatgagccagaagccaatggtgacgtactgttacctgaacttactgaacttgctgttggaaagatctttgtgaggattaggaattaggttaaaagaaattaagaaccatcttcaagcaaaaattaaactttatttctgcttaaacaataaatacacctgagttagttttccaaacctttcctcctgattaaatgcccttaaaacttaaa

SEQ ID NO: 153 - protein, 160 aa, Homo sapiens
MGKIALQLKATLENITNLRPVGEDFRWYLKMKCGNCGEISDKWQYIRLMDSVALKGGRGSASMVQKCKLCARENSIEILSSTIKPYNAEDNENFKTIVEFECRGLEPVDFQPQAGFAAEGVESGTAFSDINLQEKDWTDYDEKAQESVGIYEVTHQFVKC

SEQ ID NO: 154 - DNA, 105 bp, Homo sapiens
ctgagatcccatttcattctgaaggccggcatccccgttccttaatgggcaagaatttccgctcctacctgctggatctgcgaaacactagtacgcctttcaagg

SEQ ID NO: 155 - DNA, 1576 bp, Homo sapiens
ctcctttcccagctctcctgcctgtccgccatgttttcaggccgggtctggcttggtcttcccccgtaaggaaatggccggggagctccaggggacccaggcgccgtcgcttcggcggagcctgggctgaccagccaggacagcggggtaaacccgaacaattctgcgcgaggtagggaggccatggcgtccggcagtaactggctctccggggtgaatgtcgtgctggtgatggcctacgggagcctggacttgaaagaggagattgatattcgactctccagggttcaggatatcaagtatgagccccagctccttgcagatgatgatgctagactactacaactggaaacccagggaaatcaaagttgctacaactatctgtataggatgaaagctctggatgccattcgtacctctgagatcccatttcattctgaaggccggcatccccgttccttaatgggcaagaatttccgctcctacctgctggatctgcgaaacactagtacgcctttcaagggtgtacgcaaagcactcattgatacccttttggatggctatgaaacagcccgctatgggacaggggtctttggccagaatgagtacctacgctatcaggaggccctgagtgagctggccactgcggttaaagcacgaattgggagctctcagcgacatcaccagtcagcagccaaagacctaactcagtcccctgaggtctccccaacaaccatccaggtgacatacctcccctccagtcagaagagtaaacgtgccaagcacttccttgaattgaagagctttaaggataactataacacattggagagtactctgtgacggagctgaaggactcttgccgtagattaagccagtcagttgcaatgtgcaagacaggctgcttgccgggccgccctcggaacatctggcccagcaggcccagactgtatccatccaagttcccgttgtatccagagttcttagagcttgtgtctaaagggtaattccccaacccttccttatgagcatttttagaacattggctaagactattttcccccagtagcgcttttttctggatttgcattcaggtgttattcttaatgtttctgtcaaagcttcttaaaaatcttcacttggtttcagccatagttcaccttccctgttccaggtttatttaattccaaaggtgagagttggagtgagatgtcttccatatctatacctttgtgcacagttgaatgggaactgtttgggtttagggcatcttagagttgattgatggaaaaagcagacaggaactggtgggaggtcaagtggggaagttggtgaatgtggaataacttacctttgtgctccacttaaaccagatgtgttgcagctttcctgacatgcaaggatctactttaattccacactctcattaataaattgaataaaagggaatgttttggcacctgatataatctgccaggctatgtgacagtaggaaggaatggtttcccctaacaagcccaatgcactggtctgactttataaattatttaataaaatgaactattatcaaataaaa

SEQ ID NO: 156 - protein, 219 aa, Homo sapiens
MASGSNWLSGVNVVLVMAYGSLDLKEEIDIRLSRVQDIKYEPQLLADDDARLLQLETQGNQSCYNYLYRMKALDAIRTSEIPFHSEGRHPRSLMGKNFRSYLLDLRNTSTPFKGVRKALIDTLLDGYETARYGTGVFGQNEYLRYQEALSELATAVKARIGSSQRHHQSAAKDLTQSPEVSPTTIQVTYLPSSQKSKRAKHFLELKSFKDNYNTLESTL

SEQ ID NO: 157 - DNA, 110 bp, Homo sapiens
gcagccccttggaacctgttcaagtggctccccccgaatgacctgccccaggggcgccactcattgttatgatgggtacattcatctctcaggaggtgggctgtccacca

SEQ ID NO: 158 - DNA, 2195 bp, Homo sapiens
agaaagagattaccagccacagacgggtcatgagcgcggtattactgctggccctcctggggttcatcctcccactgccaggagtgcaggcgctgctctgccagtttgggacagttcagcatgtgtggaaggtgtccgacctgccccggcaatggacccctaagaacaccagctgcgacagcggcttggggtgccaggacacgttgatgctcattgagagcggaccccaagtgagcctggtgctctccaagggctgcacggaggccaaggaccaggagccccgcgtcactgagcaccggatgggccccggcctctccctgatctcctacaccttcgtgtgccgccaggaggacttctgcaacaacctcgttaactccctcccgctttgggccccacagcccccagcagacccaggatccttgaggtgcccagtctgcttgtctatggaaggctgtctggaggggacaacagaagagatctgccccaaggggaccacacactgttatgatggcctcctcaggctcaggggaggaggcatcttctccaatctgagagtccagggatgcatgccccagccagtttgcaacctgctcaatgggacacaggaaattgggcccgtgggtatgactgagaactgcgatatgaaagattttctgacctgtcatcgggggaccaccattatgacacacggaaacttggctcaagaacccactgattggaccacatcgaataccgagatgtgcgaggtggggcaggtgtgtcaggagacgctgctgctcctagatgtaggactcacatcaaccctggtggggacaaaaggctgcagcactgttggggctcaaaattcccagaagaccaccatccactcagcccctcctggggtgcttgtggcctcctatacccacttctgctcctcggacctgtgcaatagtgccagcagcagcagcgttctgctgaactccctccctcctcaagctgcccctgtcccaggagaccggcagtgtcctacctgtgtgcagccccttggaacctgttcaagtggctccccccgaatgacctgccccaggggcgccactcattgttatgatgggtacattcatctctcaggaggtgggctgtccaccaaaatgagcattcagggctgcgtggcccaaccttccagcttcttgttgaaccacaccagacaaatcgggatcttctctgcgcgtgagaagcgtgatgtgcagcctcctgcctctcagcatgagggaggtggggctgagggcctggagtctctcacttggggggtggggctggcactggccccagcgctgtggtggggagtggtttgcccttcctgctaactctattacccccacgattcttcaccgctgctgaccacccacactcaacctccctctgacctcataacctaatggccttggacaccagattctttcccattctgtccatgaatcatcttccccacacacaatcattcatatctactcacctaacagcaacactggggagagcctggagcatccggacttgccctatgggagaggggacgctggaggagtggctgcatgtatctgataatacagaccctgtcctttctcccagtgctgggatttctccatgtgagggggcagcaggacacccagggatctagcgtgggggaggagaggagcctaatgagaaaatgaccatctaaagcctgcccttcattggtctggttcacgtctccaaaccagcttggatggtagcagagacttcagggtgctccagccaaacgtatttgggcatcaccatgacctgggaggggaagatgcactgagacgtatgaggcttccagcctagcagccagggccctagcacaaacaggaggctcgccccatctgagcaactgcaggagaggttagtacagtcatgcattgcttaacgacagggacgtgtcgttagaaatgtgtcgttaggtgattttatgaccataggaacattgtagcgtgcacttacaccaacccagatggtacagcccaatacacacccaggatggacgctagagtcgactgctcctaggctacaagcctgcagtgcatgttatggtgtgaatactgcaggcaatcttaacaccacggcaagtatttgtgcatctacacacatctaaacatagaaaaggtacagcataaatacactattgtcatctcagcaga

SEQ ID NO: 159 - protein, 437 aa, Homo sapiens
MSAVLLLALLGFILPLPGVQALLCQFGTVQHVWKVSDLPRQWTPKNTSCDSGLGCQDTLMLIESGPQVSLVLSKGCTEAKDQEPRVTEHRMGPGLSLISYTFVCRQEDFCNNLVNSLPLWAPQPPADPGSLRCPVCLSMEGCLEGTTEEICPKGTTHCYDGLLRLRGGGIFSNLRVQGCMPQPVCNLLNGTQEIGPVGMTENCDMKDFLTCHRGTTIMTHGNLAQEPTDWTTSNTEMCEVGQVCQETLLLLDVGLTSTLVGTKGCSTVGAQNSQKTTIHSAPPGVLVASYTHFCSSDLCNSASSSSVLLNSLPPQAAPVPGDRQCPTCVQPLGTCSSGSPRMTCPRGATHCYDGYIHLSGGGLSTKMSIQGCVAQPSSFLLNHTRQIGIFSAREKRDVQPPASQHEGGGAEGLESLTWGVGLALAPALWWGVVCPSC

SEQ ID NO: 160 - DNA, 107 bp, Homo sapiens
caaaagagatgatgctgacagttattggtgtgggactgagagacctggaattgatcttggggtcaaagttcaagtgaccattaacccaggcacacaaactgcagtct

SEQ ID NO: 161 - DNA, 1303 bp, Homo sapiens
gttgacttccgagcttggattcaagtccctgaagggcaccagacacctgtgatcaccaaggagaggagaggagacaggaccatgtggctgtccccatctctgctgcttctcatcctcccaggttactccattgccgctaaaatcactggtccaacaacagtgaatggctcggagcagggctcattgactgtgcagtgtgcttatggctcaggctgggagacctacttgaagtggcggtgtcaaggagctgattggaattactgtaacatccttgttaaaacaaatggatcagagcaggaggtaaagaagaatcgagtttccatcagggacaatcagaaaaaccacgtgttcaccgtgaccatggagaatctcaaaagagatgatgctgacagttattggtgtgggactgagagacctggaattgatcttggggtcaaagttcaagtgaccattaacccaggcacacaaactgcagtctcagaatggacaaccacaacagcaagcctggctttcacagctgcagccacccagaagaccagcagccccctcaccaggtccccgctcaagagcacccacttcctgttcctgttcctcctggagctgcctctgctcctgagcatgctggggaccgtcctctgggtaaacagaccacaaagaaggtcttgaaggaggaggagtcagcccgatgatgagagtcccaatgcccattgacgtcctgtccagggcgaaaggccctcccacagaagaaaaaacattttcttttctcttctttttttctttctagagatagagtcttgctctgtcacccaggctggaatgcaatggtgtaatctctgctcactgcaactttcccctcccaggctcaagcgatcctcctgcctcaacctccagagtagctggggctacaggcacatgccaccacccccagctaatttttaaatttttttgtagagatgggcttccaccacgttgcccaggctggtctcgaactcttgacctcaagagatcctcccgcttcgcctcccaaagtggtgggattacaggtgtgagccaccgcacctggcagaaaaacaacatttctatggggaattgactgtggttctagaggcagtgctggccccagcttcagggaacagcctcctagtcccctatctcctgcagccgtgccacctggggctattcccttctctgcacagtccctggggcctgacagagcccttcttccttctgaggtctccaatgcagtagaaaacatgagaagaatgtgtttcccccgagaggcacctatgccgtagtggacatt

SEQ ID NO: 162 - protein, 194 aa, Homo sapiens
MWLSPSLLLLILPGYSIAAKITGPTTVNGSEQGSLTVQCAYGSGWETYLKWRCQGADWNYCNILVKTNGSEQEVKKNRVSIRDNQKNHVFTVTMENLKRDDADSYWCGTERPGIDLGVKVQVTINPGTQTAVSEWTTTTASLAFTAAATQKTSSPLTRSPLKSTHFLFLFLLELPLLLSMLGTVLWVNRPQRRS

SEQ ID NO: 163 - DNA, 109 bp, Homo sapiens
gttcaccgccggtcgggtccggccgccgcgctgtccagctcctgagaccttgctgtccgccggtctgccgtctgcgcgcctcacgctcctcagccctggaccggggaca

SEQ ID NO: 164 - DNA, 1963 bp, Homo sapiens
gtaagttcaccgccggtcgggtccggccgccgcgctgtccagctcctgagaccttgctgtccgccggtctgccgtctgcgcgcctcacgctcctcagccctggaccggggacaagtaaccctcggtgacaagaccaaagtgcactgctgcccacacagttcctacctttctggcttcaattcttcagaagagtttgccgtcctttggggagaacgtgatttttgttatctcagcccactgacttcattgatctctaatcttttttaattccttgggccaactttgttcgtgcccccacactgtagccagaagcccgttggcgagctctggcacctgcaaaccaccccgtggaacgagtgtttcctctggctgagggttggagaggaggtgtggtctcagcaggcggcccgtagcctcacagccaggcctggtggtgaggtcaccatgtccaccaaggtgcccatctatctgaagcgtggcagtcgcaagggcaagaaggagaagcttcgggacctgctgtcctcggacatgatcagcccaccgctgggggacttccgccacaccattcatattggcagtggcggcggcagtgacatgtttggcgacatctccttcctgcagggcaagttccacctcctgccggggaccatggtggaggggcctgaagaagatggcaccttcgacctccccttccagttcacccgcaccgccaccgtgtgtgggcgggagctcccggacggcccatcccctctgctcaagaacgccatctccctcccggttatcggtggaccccaggctctcaccctgcccacagcccaggctccacccaagccccctcgcctgcacctggagacccctcagccttccccacaggagggagggagtgtggacatctggaggattccagagactggctcccccaacagtggactgaccccggagtcaggggccgaggagcccttcctgtccaatgccagctccctgctgtccctgcacgtggacctggggccttccatcctggatgatgtcctgcagatcatggatcaggacctggacagcatgcagatccccacataggacacgaggctgcctaggctggggtcccaggtggggcccagccaggaggtggggtgtggacccggccctggcggcggagtcagggtcccaagatcccacctgtatggtcgctggccagtgattctccttctgagccgtgtttcccctctccctccctctccacgtgggcagggcaggccccatcgctttcctctgataaccacatggacacatcctgaagtcagcccaggcgccctgagcatcttggggcacctggaccccatcacaatactccttcttccttcaggtccctgggtgaaggctttgctgaaaccgaccccccttttcacgtcccttctgcctctgccccgttggatgccctgactgggggcaggggaagagacagggcacagctggccacagggctcagccactgagcaggctgttccgggcctttggctttgcatcctggacggggagtgtcctgtcagggaccagatgtgtcctgcctcatccctagctccaatcccttccccacgtgaccggggattctggttgcaataaaacatgctgctgctggtggcggagctccctgtccctttgccccaggtttcctcccggaggcagacagtctcccagagctgagggcttgcctctggagaccccagccccagagggctttgtggaggacaggccttgccctcaagaacgtcgtacctgacgctgagcctgtcatgagaatgcaacaggagcaaaccaagtgttgctgtgacattgattcagatgtttggcaagaggtggctgagcactggggtgggcttggcactgtgccaagcctggggccaatccctgcccagtcagctggggtctggtgggggacacccaagaataaaagaataaccacaaa

SEQ ID NO: 165 - protein, 210 aa, Homo sapiens
MSTKVPIYLKRGSRKGKKEKLRDLLSSDMISPPLGDFRHTIHIGSGGGSDMFGDISFLQGKFHLLPGTMVEGPEEDGTFDLPFQFTRTATVCGRELPDGPSPLLKNAISLPVIGGPQALTLPTAQAPPKPPRLHLETPQPSPQEGGSVDIWRIPETGSPNSGLTPESGAEEPFLSNASSLLSLHVDLGPSILDDVLQIMDQDLDSMQIPT

SEQ ID NO: 166 - DNA, 104 bp, Homo sapiens
cctggcaggggcttctgctcacagcctcacttctaaacttctggaacccgcccaccactgccaagctcactattgaatccatgccgctcagtgtcgcagagggg

SEQ ID NO: 167 - DNA, 1167 bp, Homo sapiens
agcagagcctaagtcacagtagccctgactacagcattcctggagcccaggctcttttccacagaggaggaaagagcaggcagcagagaccatggggcccccctcagcctctccccacagagaatgcatcccctggcaggggcttctgctcacagcctcacttctaaacttctggaacccgcccaccactgccaagctcactattgaatccatgccgctcagtgtcgcagaggggaaggaggtgcttctacttgtccacaatctgccccagcatctttttggctacagctggtacaaaggggaaagagtggatggcaacagtctaattgtaggatatgtaataggaactcaacaagctaccccaggggccgcatacagcggtcgagagacaatatacaccaatgcatccctgctgatccagaatgtcacccagaatgacataggattctacaccctacaagtcataaagtcagatcttgtgaatgaagaagcaactggacagttccatgtataccaagaaaatgccccaggccttcctgtgggggccgtcgccggcatcgtgaccggggtcctggtcggagtggcgctggtggccgcgctggtgtgtttcctgctccttgccaaaactggaagaaccagcatccagcgtgacctcaaggagcagcagccccaagcccttgcccctggccgtggtccctcccacagctctgccttctcgatgtcccctctctccactgcccaggcccccctacccaaccccaggacagcagcttccatctatgaggaattgctaaaacatgacacaaacatttactgccggatggaccacaaagcagaagtggcttcttagcttcctccaggagctgctcctgtgtgttgatggagagtccccaaggcccccagccctggggatggggaaggacatgaagcctgagccagagaaccagctataagtcctgagaagacactggtgtctgggggcagggagggatgggggtccctgatgaatatctggagacctcgacagcctgccctaggccctgggtgggtcaggacaaaggcctctcatcaccgcagaaagcgggggcttgcagggaaagtgaatgggcctgtggcccacctggggtcacttggaaaggatctgaataaaggggacccttcctctca

SEQ ID NO: 168 - protein, 252 aa, Homo sapiens
MGPPSASPHRECIPWQGLLLTASLLNFWNPPTTAKLTIESMPLSVAEGKEVLLLVHNLPQHLFGYSWYKGERVDGNSLIVGYVIGTQQATPGAAYSGRETIYTNASLLIQNVTQNDIGFYTLQVIKSDLVNEEATGQFHVYQENAPGLPVGAVAGIVTGVLVGVALVAALVCFLLLAKTGRTSIQRDLKEQQPQALAPGRGPSHSSAFSMSPLSTAQAPLPNPRTAASIYEELLKHDTNIYCRMDHKAEVAS

SEQ ID NO: 169 - DNA, 101 bp, Homo sapiens
aagaagatggccaagcaaggccagatggatgctgttcgcatcatggcaaaagacttggtgcgcacccggcgctatgtgcgcaagtttgtattgatgcgggc

SEQ ID NO: 170 - DNA, 1017 bp, Homo sapiens
aatccggaaacggcggcggcggcgacaggaccgaggggccttagttggtgggcaagtcggggatcccagaaagagaagcgtgacccggaagcggaaacgggtgtccgtcccagctccggtgagtggcccctgctggaccgtggatcccgggcgggcgtgcgggcggcagcgtacgaggccttctactcgcccgggtgtccggtgcctcgcttctccctgggaccctgtcgtcaacatcgaggcctgccagtgagcttctaccatcatggacctattgttcgggcgccggaagacgccagaggagctactgcggcagaaccagagggccctgaaccgtgccatgcgggagctggaccgcgagcgacagaaactagagacccaggagaagaaaatcattgcagacattaagaagatggccaagcaaggccagatggatgctgttcgcatcatggcaaaagacttggtgcgcacccggcgctatgtgcgcaagtttgtattgatgcgggccaacatccaggctgtgtccctcaagatccagacactcaagtccaacaactcgatggcacaagccatgaagggtgtcaccaaggccatgggcaccatgaacagacagctgaagttgccccagatccagaagatcatgatggagtttgagcggcaggcagagatcatggatatgaaggaggagatgatgaatgatgccattgatgatgccatgggtgatgaggaagatgaagaggagagtgatgctgtggtgtcccaggttctggatgagctgggacttagcctaacagatgagctgtcgaacctcccctcaactgggggctcgcttagtgtggctgctggtgggaaaaaagcagaggccgcagcctcagccctagctgatgctgatgcagacctggaggaacggcttaagaacctgcggagggactgagtgcccctgccactccgagataaccagtggatgcccaggatcttttaccacaacccctctgtaataaaagagatttgacacta

SEQ ID NO: 171 - protein, 222 aa, Homo sapiens
MDLLFGRRKTPEELLRQNQRALNRAMRELDRERQKLETQEKKIIADIKKMAKQGQMDAVRIMAKDLVRTRRYVRKFVLMRANIQAVSLKIQTLKSNNSMAQAMKGVTKAMGTMNRQLKLPQIQKIMMEFERQAEIMDMKEEMMNDAIDDAMGDEEDEEESDAVVSQVLDELGLSLTDELSNLPSTGGSLSVAAGGKKAEAAASALADADADLEERLKNLRRD

SEQ ID NO: 172 - DNA, 100 bp, Homo sapiens
acagaatctgccggatggtgctggccacttgcttgggatcctttatcctggtcatcttctatttccaaagtatgttgcacccagtcatgcggaggaatcc

SEQ ID NO: 173 - DNA, 5734 bp, Homo sapiens
atttggtaaaacccagccccggaatatatagatcgttggagcgcaatgaagtagcctttggagagaagggagagggcccgtcggacagccacagcggccagcgcagcggcagcggcggcggcaccaccatcaccgctcgcaccccagccgcccggcccgcgaccaggcagcggcggccgccggcgggatcggaggaggcggcggagcggcgaggaggaggagcaggagcgcgcagccagcgggtccacgcatctcagcacttccagaccaactccggcaccttccacacccctgcccgggctgggggctccgagagcggccgcgaagcgactccgatcctccctctgagccttgctcagctctgccccgcgcctcccgggctccggtccgcgcggcggggtccctgctcctgcgccccgggcgcgcttcccggacaccccggtccccgcagccaggacaaagccatgaagccagcgctgctggaagtgatgaggatgaacagaatctgccggatggtgctggccacttgcttgggatcctttatcctggtcatcttctatttccaaagtatgttgcacccagtcatgcggaggaatccctttggtgtggacatctgctgccggaaggggtcccgaagccccctgcaggaactctacaacccaatccagctggagctctcaaacactgctgtcctgcaccagatgcggcgggaccaggtgacagacacgtgccgagccaacagcgccacaagccgtaagcggagggtgctgacccccaacgacctgaagcacttggtggtggatgaggaccacgagctcatctactgctacgtgcccaaggtggcctgcaccaactggaagcggctcatgatggtcctgaccgggcgggggaagtacagcgaccccatggagatcccggccaacgaggcacacgtctccgccaacctgaagaccctgaaccagtacagcatcccagaaatcaaccaccgcttgaaaagctacatgaagttcctgtttgtccgggagcccttcgagaggctagtgtccgcctaccgcaacaagttcacccagaagtacaacatctccttccacaagcggtacggcaccaagatcatcaaacgccagcggaagaacgccacccaggaggccctgcgcaaaggggacgatgtcaaattcgaggagtttgtggcctatctcatcgacccacacacccagcgggaggagcctttcaacgaacactggcaaaccgtctactcactctgccatccctgccacatccactatgacctcgtgggcaagtacgagacactggaagaggattctaattacgtcctgcagctggcaggagtgggcagctacctgaagttccccacctatgcaaagtctacgagaactactgatgaaatgaccacagaattcttccagaacatcagctcagagcaccaaacgcagctgtacgaagtctacaaactcgattttttaatgttcaattactcagtgccaagctacctgaaattggaataaagggggtggggagagggagagaatcatgctttttaatttaagatttttatttgtcaaaagaattatatggatattgggttattttgtaaattaatatttctttggggatgatgctgcgagcagcatagtgagaattatttaaaatccttcgtagggaaggacagctgtctttgcaggggaaataggatgggtcgtccttgtctgtagaagtgaatactgcaacactgtctcaaaggtttcttgtgttctggtgaattccatgaattgtgcattccataaattctaattaatattatttatagttatttaaacatggtctcattatttctttttgtggcagcaaaattctaacatctttccagaagaaatctatgattcctgctttgcttgctacagctcatttgggggcatgaatgttctccttactaacctctcatggagtcatgtgataacagccattgtcatgtgtatggatgccaccattcttgaatttctgctagaaataagtaggttgctattgcacttagagtcatctttgcaagggactcattccaaaccaattccaatcgacctgaaagtcccttgcactaaagaaatgtgatttttttttaacccaaggagaaagttggttgtaacaatttttcaccagaattagcaatctgatagaataggcttttttaacaggaattttaaactggcggtgccagttgcagtgaaggtgaagtggctattgctttatattcgacaaatatttattgagcatctactatatactaggccctgaagatagagcgttgaacaaacccaatagtcttggccctcaaaaagctttatgtgacatagagcatccagctcgacaattagcaaacccctgatattattcatggacttgacatgaggtttggactattcatgagcaacagcagaaggtccatgacccctacaaatttacatttttctatggcccatatttgaaaacctcacattcggagcaggccactttatattcgtgagtgatcccaagctcactgaccaacagaaaagatgctaaaaaaatgtgtcctatcatgtgcctgctccaactgatgggtaatgtctgcctttaagccccagaatggattctccaggcacagtgtggaagagtgctgtggttgattagcaatgtctgccttgggtgaggaaaggggaacactcctcaagtgcctcctactgtcatctccattcagcctagcaccacatccccatgtagaagtgttgtcttctactgcttgccacgtacaagtgtgaaatgccaaggtgagactcgtacacttggggatttgcaatggtttttacccctcatgaaggtcagaggtggactatttgtacacatacacacatgcacaccctctcacgtcctccagaggctgaaagactatcagcatcttggtaactgccatgcatgagcagcaaggacagccttccataatccatgccccatttcctctggaagcctggaaacttttcatttcctgttccttgctaattaacatctaaacatgcttctcatttccagccattgctgatgcttctcagttgaagtttgagccacatccctcttacagctagtgaatgagttggtagcagctactgtatataataataataatagttttaataataggggagggtgggatggggtgtgggtaagttttgccttttgttttgtttttgatgccgtatatagtgaaggggtgaggatattctaaacaaacaaaaattgaataatttattcacagaaactattaagattgtattgtaaagctcacagcaagctcagtgggcagcagctgcaacatctcaccggggaaattattttatttaacgtgagtgagatgtgggccggagaaggtagctgaagctatttataaaacgttgtgtaccttcttccgagctctctcccctttgtgaagggcgcagcaactatacccttgatggatggagatttacgcaatgtgttttactgggtagagtgacagaccttggctgtccctggaattgagaatctggaccttatttccaggcagagaacactgtcctcagaaatgggacttctgataatgaaacaggttgtccaacattttctaatacgcattctacagaacacaggttccaggaggcatcaggttggtgtgatgcagactaagggttttgtggtcaaatatccttaagaaacaaagttaagtcagtttcctttctgcaaggacttttcagccttcaatgtgtgctgtgcatggtgaatccccaaaaataatccttgagtctgtagcatttcctgaacttacatgaccaggatactctattttgcagatcaccccacagagctagggttccaccgagtatactttgcttaggttgacttagcatatctgaggtcttcaaggataaaaactgccaccccaacacccttccattaaaaaaaaaatacaaaatagcaccacagtctccatctggtttatagcaacagaggtactttatttaatgaagcaatggttctaatcctggatactgccacggactacaattctatccctcccagagggagtggaggaagtcttgggtggtgtggacagaaggaagagaggagagggtgagtggggtatagggcccagggtggctccctactcctcaggctcaaaaggatgctcagtgggaacagatgatctcttgatgagtgcttcttcagtttcatagtttggaatcgttcactgtgtgctttttggggggttttcaatggaaattcacgttgctttgcatttctgtgtccgtctttggtcagttgtgcaagcctgctcactgtcatgtgaagatggcctttcatctggcttctctctcttaagtgagaaagattgtccttcaggggacatgacatcaataggtttctggaatgagggactctttctccccgtgttttgctttgtgttcacattttcttttctaatggcattgaaactttaaaaaaaatggattcaactgtttttgcagaatgtagaaagtattctgtgtccttggttaaagaaatccacttgtgaagtgtgcctggaaaatgaaagtttgtgttttttaaagaggaatatttgaaactgctttctatgcatgcttagctggagaaaagtacaggcaggcgtcccatctcccagccacttctcaaaggtgctgctgtgttttaaagaccaggtacagccagggcagtatttgcaaggacattcctgcttactttatccctttggttggaaagctctagatgattcccgcagctcctccagaccccgcctccctgccctccccagctggtctgggaagaggtggtctgctgacctgtggtatctcagaggggacgttcctcctcctccctgtgcaccaggtgggctgcaccctcctgcctattcaggatgtggatgccacaggagagcagcaggcagtggaaacttcagttgcactggttctcctggtggcaaaggcatgaagcacaggggtcgattaatccaggctactagaaagctccagagcaaagtgtgcgggtcccacaaatgcttggctggtggggtctggatcagtgctgagatagagttggcagaagaagcagaggcactctgcttgctttcctagccagtcctcccctacacacacacacacacacacacacacacacacacacaatctcagctgcgccattctgtgcaatcccagtgaccaaatcccttccttgcccacctctatgtcagcaggactgaccacatcactcccccgagttcccaccaccagcatttcctccaacctttttccatcacaaccagttagaaccctacaggcaacaaggccttctagaatccgcttaacccttggctgataacaggcaaatttcagtctgctacactttgttaggtccagaaggagctgcccatactactttcttatgagcatgctcagtatggcatatggacatgtaatgtcacatctttgtggagtgtgattttcttttttcacatatttgtatgcagtagagagcctgttgtagaaaacgctccctgtatcttgctgtactgttaaagaaagctgaattccacattgccaacaaaagcgtgaaaatgttcatgaaccttcctccaggaaaagccattcaagcctgattatttttctaagtaacttcaattaaattgaagaaaaaagaa

SEQ ID NO: 174 - protein, 352 aa, Homo sapiens
MKPALLEVMRMNRICRMVLATCLGSFILVIFYFQSMLHPVMRRNPFGVDICCRKGSRSPLQELYNPIQLELSNTAVLHQMRRDQVTDTCRANSATSRKRRVLTPNDLKHLVVDEDHELIYCYVPKVACTNWKRLMMVLTGRGKYSDPMEIPANEAHVSANLKTLNQYSIPEINHRLKSYMKFLFVREPFERLVSAYRNKFTQKYNISFHKRYGTKIIKRQRKNATQEALRKGDDVKFEEFVAYLIDPHTQREEPFNEHWQTVYSLCHPCHIHYDLVGKYETLEEDSNYVLQLAGVGSYLKFPTYAKSTRTTDEMTTEFFQNISSEHQTQLYEVYKLDFLMFNYSVPSYLKLE

SEQ ID NO: 175 - DNA, 107 bp, Homo sapiens
agatatatagctgacatgatctcaggaaatggatacacaaccattgttccagacttctttgtagggcaagagccttgggacccctctggcgactggtctatcttccc

SEQ ID NO: 176 - DNA, 3893 bp, Homo sapiens
ctctcgtctcctccccactgcgcctccctccctcctggccttccttcccttccccgactttgcagatttctcttcccccaggcctccctcctccacctctccgccccctccgggcttggctctcccaggaggctacgactggagccactggtcccgcaggatccccgcgtcctcggtcgccgcgtccacgtccctctcgcgtccccgcccggcgccacgccgcctcctctgggttcggcctccgcgcggtgcagcgcagtctcaggccgcgggacaagcccgacttaaatctctgcaatggctaacgaagcttatccttgtccgtgtgacattggccacagacttgagtatggagggctaggccgtgaagttcaagtcgagcacatcaaggcttatgtcaccaaatcccccgttgatgcaggcaaagctgtgattgtcattcaagatatatttggctggcagttgcccaataccagatatatagctgacatgatctcaggaaatggatacacaaccattgttccagacttctttgtagggcaagagccttgggacccctctggcgactggtctatcttccctgagtggctgaaaacaagaaatgcccagaagatcgatagagagatcagtgctatcttgaagtatctgaaacaacagtgtcatgcccagaaaattggcatcgtgggattctgctggggtggaactgctgtccatcatttgatgatgaaatactcagaattcagggcaggggtgtccgtctatggcattgtcaaggattctgaagacatttacaatttaaagaaccccactttgttcatttttgctgaaaatgatgttgtgattccactcaaggacgtatctttgctgactcagaagttgaaagaacactgcaaagttgaatatcaaattaaaacattttctgggcagactcatgggttcgtgcatcggaagagagaagattgctcacctgcagacaagccctacattgacgaggccagaaggaatttaattgagtggctgaacaagtacatgtagcaagaatcaagggcaagccttcctagaatagctttcatcccaaaatttgcttggaaatagttagatcatttgatttaattttcacttttataaaataagtgtaggaatcctaaaattgattatttcatttgaaacacaaattcagtaggacgtaatgcatgaaataatttaatttttgacatgtacatcgaatcataatttaaaaacaaggtctgaccaggtgtagtgcctcatgcctgtaattccagcactttgggaggccaaagtgggtggatcacctgaggtcaggagtttgagaccagcctggccaacatggtgagaccccatctctacaaaaaatacaaaaattagcctggtgtggtggtgcacgcctgtagtcccagctacttgggaggctgaggcacaagaatcaatagaacccaggaggtggagactgcagtgagccaagattgtgccactactgtactctagcctgggcagcagagtgagaccctgtctcaaaaataaataagtaaataaataaataaataaaataaaaaccaggtcagtacctggagaatttgaatgatagagaatgatagagtaataccctaattattagttaaaacctacaggccgggtgcggtggctcacgcctgtaatcccagcactttgggaggccgaggtgggtggatcacttgaggtcaggagttcaagaccagcctggccaacatggtgaaaccccatctctactaaaaatataaaaatcagccgggcatggtggcatgtgcctgtaatcccagctactcaggagtctgaggaggagaatcacttgaacctggaggcagaggttgcagtgagtcgaggttgcgctactgcactccagcctggacaacagagggagactctgtctcaaaaaaaaaaaaaaacctacagctgttcaaggaccagctgacaggtcaagtgtggccttttctggtctttgaacacatcatagaaagtgacaaatgctgcaaagccatgaagaacatgaactataaacgggtagactaactgcccagcttagacacttatctatgccacaaaacagctgaatttgtcacatttatatattgcaatatgggaagtattgagatcaaaacaggattccattgacctaattatattaagctaataaactaattttttgaatttttgaatttgcagcttttttaaaaagatagcagagaacggtgggctagagttgtcacccagctgttgtctcctaagcagtggatttccaagcactggcatttttgggtcccagggcctgaggctacctcagaaatatctcctgtgtttctggtggtggcgtaaaggggagagccggtgagaaactctgcacctgcacctacggggtgcgtacatgtgactttgggcaagtgacttgatgttgtagtttttttcctaattttgtcttgacgtccttctcaggagagagtggctgtaaactctagccctgccctgacggggatcctggggatgtggtcgtgggtgtttcccatgtgcctttcatgggatccttctttgacctcacagacggcctgattcctgagtgtccaacctgtggccaggtgtccctctcgcaggaagcttgtttatcctggcacatgaccttgtggctctcatctgacctgtgtccagtttattcctactgagacagccactctcccggagagccctgaccgggaaagaagttaggatggggtagaggaggcaactcatcagaacccaagaaatgacagaagcagtttattgcttacagatccagagaacagagggcagcacgcttcacagggccagcaaaaagggggagccattcaggacacatgggctcaaccagaaggtggagaacgagagagagagggagctatgagccaaagccttcactggggcccagggtgtcatctatgcaggtttcccctggaggttctaactggggggtttagagcaagcaggcatgagccccggggactcacgctgtgactgagaggggtcggtgtgggtaggatatcggcatggtccatgtgggtgtgggggtcagtgggacaagtcaagcaggtggtatccagctgtccatgggaaggtggtcccaggaggcggttttgtaaggcagatgtctggatcgaccaccttggggaacagtgagaagttgtataactggaaactgtgttactaatccctgcttctagtatgagaaagtccaacttacattcaaatagatgctcaggaaacataaaattcaaagaattcccaaacttgagcttcctgagcctcagtttttgcatctgtcaaatgggtatggggagaccctttgcctaatgttgagagaatccaagcctgagcagggctggtctactgtggacacttagttgtggaccccaacaggccaaagcccttgcctgctgagggctgctcccaggaggcctcacacattcatccggcctcccaggaaacccctgagatgtgctgggcttttgccgtggaacggtgtcggtgagcatgtggccagtagccagagtcttcaacataggtgggaggtctgaaattcgtgcgagaatgaaccaagggtgtggctgtatccttcatggtgagcttggggcctgggcagccttccctctgctgagtcctttggtcaaatgtcatggtgttctgaaccagcactgcagatagaagtataatgtaagtcacacacgtacttctttaaaaagatatgttcttcagtgactattagacaaacagataaatgaaggtaaagggaaaaaatggcaactttagcttttttccccatgtatgtaattttaaattttcttatagccccattaaaaaaaggaaagaga

SEQ ID NO: 177 - protein, 245 aa, Homo sapiens
MANEAYPCPCDIGHRLEYGGLGREVQVEHIKAYVTKSPVDAGKAVIVIQDIFGWQLPNTRYIADMISGNGYTTIVPDFFVGQEPWDPSGDWSIFPEWLKTRNAQKIDREISAILKYLKQQCHAQKIGIVGFCWGGTAVHHLMMKYSEFRAGVSVYGIVKDSEDIYNLKNPTLFIFAENDVVIPLKDVSLLTQKLKEHCKVEYQIKTFSGQTHGFVHRKREDCSPADKPYIDEARRNLIEWLNKYM

SEQ ID NO: 178 - DNA, 109 bp, Homo sapiens
ccccgagatcaagagcgacatcgagaaggccaagcagaacctcagcatcatgatccaggacctggatatcaccgtgatggtgttccaccattttggaaaagacttcccc

SEQ ID NO: 179 - DNA, 2768 bp, Homo sapiens
gtccccgccccacagccaacctcccgggcaccgttgcccgcccggggcccgctaccggcccaggccccgcctcgcgagtcctcctccccgggtgccttcccgcagcccgctcggcccagagggtgggcgcggggctgcctctaccggctggcggctgtaactcagcgaccttggcccgaaggctctagcaaggacccaccgaccccagccgcggcggcggcggcgcggactttgcccggtgtgtggggcggagcggactgcgtgtccgcggacgggcagcgaagatgttagccttcgctgccaggaccgtggtgaagcctctgggcttcctgaagcccttctccttgatgaaggcttccagccgcttcaaggcacaccaggatgcactgccacggctgcccgtgccccctctccagcagtccctggaccactacctgaaggcgctgcagcccatcgtgagtgaggaggagtgggcccacaccaagcagctggtggatgagtttcaggcctcaggaggtgtaggggagcgcctgcagaaggggctggagcgtcgggccaggaagacggagaactggctgtctgagtggtggctcaagaccgcctacctccagtaccgccagcctgtggtcatctactcgagcccaggcgtgatgctacccaagcaggacttcgtggacctgcagggtcagctccgatttgctgccaaactcattgagggtgtgttggatttcaaggtcatgattgacaacgagaccctgcccgtggagtacctgggggggaagccactgtgcatgaaccagtactatcagatcttgtcctcctgccgagtgccgggccccaagcaggacacagtcagcaacttcagcaagaccaagaagcctcccacgcacatcaccgtggtacacaactaccagttttttgagctggatgtgtaccacagtgacgggacacccctcactgcggatcagatctttgtgcagctggagaagatctggaactcatccctacagaccaacaaggagcctgtgggcatcctcacctccaaccaccgcaactcctgggccaaggcatacaacaccctcatcaaagacaaggtgaaccgggattccgtgcgctccatccagaagagcatcttcaccgtgtgcctagatgcaaccatgcccagggtctcagaagacgtgtaccgcagccacgtggcaggccagatgctgcatgggggcggcagcaggctcaacagcggcaaccgctggttcgacaagacgctgcagttcatcgtggcagaagatggctcctgtgggcttgtgtacgagcatgctgcagcggaggggccccctattgtcacccttctggactatgtcatcgagtacacgaagaaacccgagcttgtgcggtctcccctggtgcccctgcccatgcccaagaagctgcggttcaacatcacccccgagatcaagagcgacatcgagaaggccaagcagaacctcagcatcatgatccaggacctggatatcaccgtgatggtgttccaccattttggaaaagacttccccaagtcggagaagctaagcccagatgccttcatccagatggctttgcagctggcctactacaggatctacggacaggcatgtgccacctatgaaagtgcctccctgcgcatgtttcacctgggccgcaccgacaccatccgctcggcttccatggactcactcacctttgtcaaggccatggatgactccagcgtcacggagcaccagaaggtggagctgctgcggaaggccgtgcaggcccaccgaggctacaccgaccgggccatccgcggggaggcctttgatcgacacctgctgggcctgaagctgcaggccatcgaggacctggtgagcatgcccgacatcttcatggacacctcctacgccatcgccatgcacttccacctctccaccagccaggtccctgccaagacagactgtgtcatgttcttcgggcccgtggtccccgacggctacggtgtctgctataaccccatggaggcccacatcaacttctccctgtcggcctacaacagctgcgcggagaccaacgccgcccgcctggcgcattacctggagaaggcgctcctggacatgcgtgccctgctgcagagccacccccgggccaagctctgagcccctaggactcaggcctgccaatgccacagccaagcccaccctgggatgggccacccaccagggctcagctccttggttccctcttccttggttccctcttccctggtccccccaaatctactgagccacggaccgcatcctccagggggcctgcaggccccagccaagtgccttccgtgggtcatcccagcacctgccagggcccgacctggggctgagtgcagaggctgagcaggacgttaggcccgggcccctggcacgtcctccaccggtgcctcctctggggaagggaaccagccctccagagcaggagactggcaagagctctttgtctcaccagctcagccccggccactccctgccaactccatgaccaggccaccatctgtaccctgcttcccaaactcccaggacctggagacaggattgtctggggccgaggggccagggtgtgaggtttcacctccgttgcggctgtgctcctgtggataacattgctagcgagccgcctctggttccactcagcttggttcctgcccccgccctgctgtatgatattaatgtggaaggtcatcaataaaggggaattgtgttggtgaa

SEQ ID NO: 180 - protein, 626 aa, Homo sapiens
MLAFAARTVVKPLGFLKPFSLMKASSRFKAHQDALPRLPVPPLQQSLDHYLKALQPIVSEEEWAHTKQLVDEFQASGGVGERLQKGLERRARKTENWLSEWWLKTAYLQYRQPVVIYSSPGVMLPKQDFVDLQGQLRFAAKLIEGVLDFKVMIDNETLPVEYLGGKPLCMNQYYQILSSCRVPGPKQDTVSNFSKTKKPPTHITVVHNYQFFELDVYHSDGTPLTADQIFVQLEKIWNSSLQTNKEPVGILTSNHRNSWAKAYNTLIKDKVNRDSVRSIQKSIFTVCLDATMPRVSEDVYRSHVAGQMLHGGGSRLNSGNRWFDKTLQFIVAEDGSCGLVYEHAAAEGPPIVTLLDYVIEYTKKPELVRSPLVPLPMPKKLRFNITPEIKSDIEKAKQNLSIMIQDLDITVMVFHHFGKDFPKSEKLSPDAFIQMALQLAYYRIYGQACATYESASLRMFHLGRTDTIRSASMDSLTFVKAMDDSSVTEHQKVELLRKAVQAHRGYTDRAIRGEAFDRHLLGLKLQAIEDLVSMPDIFMDTSYAIAMHFHLSTSQVPAKTDCVMFFGPVVPDGYGVCYNPMEAHINFSLSAYNSCAETNAARLAHYLEKALLDMRALLQSHPRAKL

SEQ ID NO: 181 - DNA, 109 bp, Homo sapiens
gcccctggcggaggggccgcaggtcaccggccccatcgaggtccccgcggcccgagcagaggagcggaaggcgagcggccccccgaaggggcccagcagagcctccagt

SEQ ID NO: 182 - DNA, 1178 bp, Homo sapiens
ggagaacgggcggagggcgcgggccgaccgggcgcaccgaccatggcctccaaatgccccaagtgcgacaagaccgtgtacttcgccgagaaggtgagctccctggggaaggactggcacaagttctgcctcaagtgcgagcgctgcagcaagacgctgacgcccgggggccacgccgagcatgacgggaagccgttctgccacaagccgtgctacgccaccctgttcggacccaaaggcgtgaacatcgggggcgcgggctcctacatctacgagaagcccctggcggaggggccgcaggtcaccggccccatcgaggtccccgcggcccgagcagaggagcggaaggcgagcggccccccgaaggggcccagcagagcctccagtgtcaccactttcaccggggagcccaacacgtgcccgcgctgcagcaagaaggtgtacttcgctgagaaggtgacgtctctgggcaaggattggcaccggccctgcctgcgctgcgagcgctgcgggaagacactgacccccggcgggcacgcggagcacgacggccagccctactgccacaagccctgctatggaatcctcttcggacccaagggagtgaacaccggtgcggtgggcagctacatctatgaccgggaccccgaaggcaaggtccagccctaggctacagcggctctcatgatgtgggctcacctgcgccccagaccctgcaggggcccccctgcttggctctgctgggagagtgctcagccgcccagtcctgcctgcaagcccagggcgagtattggaggaggggcagccacgggcagagcaccatgcccatccccgagtctctggtgtgtctgccccctctggcatcctctgggcgtcccatgatcccttctgtgtctgcgtgtccgaatccccgtgtgaccctgtcccagcattttcccgccgaccctgcgtgtccccgtggcgctgtccgctctccctctcctgctgcccacccacctgccagtgttatttatgctcccttcgtgggtgatggccacgccctcaccatgtccctggcagagggcttccctccgggatcccctgcctggtgcccacactgcctcgcaagcgctcgccaccctcacgtggctcacctgctgttgagccttgtgctgtcaataaacggtttgaggattgca

SEQ ID NO: 183 - protein, 208 aa, Homo sapiens
MASKCPKCDKTVYFAEKVSSLGKDWHKFCLKCERCSKTLTPGGHAEHDGKPFCHKPCYATLFGPKGVNIGGAGSYIYEKPLAEGPQVTGPIEVPAARAEERKASGPPKGPSRASSVTTFTGEPNTCPRCSKKVYFAEKVTSLGKDWHRPCLRCERCGKTLTPGGHAEHDGQPYCHKPCYGILFGPKGVNTGAVGSYIYDRDPEGKVQP

SEQ ID NO: 184 - DNA, 102 bp, Homo sapiens
taagaaaatcatcgaaaagatgctgaacagtgacaaatccaactgaccagaagggaggaggaagctcactggtggctgttcctgaaggaggccctgccctta

SEQ ID NO: 185 - DNA, 1174 bp, Homo sapiens
acagagcccgggccgcaggcacctcctcgccagctcttccgctcctctcacagccgccagacccgcctgctgagccccatggcccgcgctgctctctccgccgcccccagcaatccccggctcctgcgagtggcactgctgctcctgctcctggtagccgctggccggcgcgcagcaggagcgtccgtggccactgaactgcgctgccagtgcttgcagaccctgcagggaattcaccccaagaacatccaaagtgtgaacgtgaagtcccccggaccccactgcgcccaaaccgaagtcatagccacactcaagaatgggcggaaagcttgcctcaatcctgcatcccccatagttaagaaaatcatcgaaaagatgctgaacagtgacaaatccaactgaccagaagggaggaggaagctcactggtggctgttcctgaaggaggccctgcccttataggaacagaagaggaaagagagacacagctgcagaggccacctggattgtgcctaatgtgtttgagcatcgcttaggagaagtcttctatttatttatttattcattagttttgaagattctatgttaatattttaggtgtaaaataattaagggtatgattaactctacctgcacactgtcctattatattcattctttttgaaatgtcaaccccaagttagttcaatctggattcatatttaatttgaaggtagaatgttttcaaatgttctccagtcattatgttaatatttctgaggagcctgcaacatgccagccactgtgatagaggctggcggatccaagcaaatggccaatgagatcattgtgaaggcaggggaatgtatgtgcacatctgttttgtaactgtttagatgaatgtcagttgttatttattgaaatgatttcacagtgtgtggtcaacatttctcatgttgaaactttaagaactaaaatgttctaaatatcccttggacattttatgtctttcttgtaaggcatactgccttgtttaatggtagttttacagtgtttctggcttagaacaaaggggcttaattattgatgttttcatagagaatataaaaataaagcacttatagaaaaaactcgtttgatttttggggggaaacaagggctacctttactggaaaatctggtgatttatatcaata

SEQ ID NO: 186 - protein, 107 aa, Homo sapiens
MARAALSAAPSNPRLLRVALLLLLLVAAGRRAAGASVATELRCQCLQTLQGIHPKNIQSVNVKSPGPHCAQTEVIATLKNGRKACLNPASPIVKKIIEKMLNSDKSN

SEQ ID NO: 187 - DNA, 101 bp, Homo sapiens
gtgatgtgaaactccctgccgatgctggtcatcttattcagctgagtcagccactgtcaccgatgtctacctgctgaccctggccttggccgacctgttct

SEQ ID NO: 188 - DNA, 2153 bp, Homo sapiens
aatccctagaaatcaattatgttttgatcatcatctatgccctgatgtttctactgaacgtgatgtgaaactccctgccgatgctggtcatcttattcagctgagtcagccactgtcaccgatgtctacctgctgaccctggccttggccgacctgttcttttccctgacattgcccatcttggctgcctccaagatgaatggctggatttttggcacaatctgtgccaggtggtctagctcctgaaggaagtcaacttctacggtggtattctactactggcctgccgcagcatggactgttacctggccattgtccatgccacacgcacactgacccagcagcgccacttggtcaagttcatatgtctgggtttgtggaacctgttcctgttactgtccctacgcatcttgcttttccgaaggaccttctacccatccaatgttagcccagtctgctatgaggacatgggcaacaatacagcaaactggtggatgctgttacggatcctgccccagtcctttggcttcatcgtgccgctgcgatcatgctgttctgctacagattcaccctgcatacgctgtttaaggcccatatggggcagaagcactggaccatgtgggtcatctttgctgttgtcctcattttcctgctctgctggctgccctacaacctggtcctgctggcagacaccctcatgggaacccagatgaccaatgagacctgtgagcgccgcaacgacatcaaccaggccctggatgccactgagattctgggcatccttcacagctacctcaatcccctcatctacgccttcattggccagaagttttgccatggacttctcaagattatagccatacacggcttgatcagcaaggactccctgcccaaagacagcaggccttcctttgttggctcttcttcagggcacacttccactactctctaagacctcttgcctaagtgcagtcccgtggggttcctcccttctcttcacagtcacattccaagcctcatgtccactagctcttcttggtctcagtgtcagtgcagcccccactgtggtcgcaggaagcagaggaggccacgttcttactagtttcccttgcatgatttagaaagcctgccctggtacctcaccccttgccataattactacatcacttgctggagctctgtccctcctgcccttgagctcatggcactctatgttctaagaagtgaaaatctacactccagtgagacagctctgcatactcattaggatggttaatgtcagaagaaagaaaatcataaaatagaaggtgtccacaaaggtgcagagaaagtggaattctcgggcatcgtgagcgggaatgtaaaatgttgtggccactgcggaagacagtatggcatctttcctcaaaacatcagacatagaattaccacatgatcctgcaattccacttgtagtaattgacccacaagaagtgaaagcagggacttgaacacatatttgtacaccaatattcatagctgcttattcataagacccaaaaggcagaaacaacccaaatgttcatcaatgaatgaatgaatgaatggctaaacaagatgtgatgtgtacaatgttcatcaatgaatgcatggctaagcaaaatgtgatatgtacataacgaagtatccttcagcctgaaagaggaatgaagtactcatacttgttacaacacggacgaaccttgaaaacttcatgctaagtgaaataagccagacataaacagataaatagtttatgattccacttacatgaggtactgagagtgaacaaattcacagagacagaaagcagaacagtgattaccagggactgaggggaggggagtatggggagtgatggtttaatgggcacagagtttatgtttgggatgttgaaaaagttgtaaagataaacagtagtgatagttgtacaataatgtctgagtacttaatgccactaaactgtacacttaaatgtctaaaatggtaaaattttatgtatattttacctcaattaaaaagaaaacaccttggcccccaaaggtacttttgccaaagaaccaaggctgaaatttcttgctaaatgagataattaaatgtctttcattgcttaaaccaaaaaaaaaaaaaaaaaa

SEQ ID NO: 189 - skipped

SEQ ID NO: 190 - DNA, 103 bp, Homo sapiens
tagctggcaaggatgcagcagcagagtacgatgagttggcagaacctcaagactttcaggacgatcctgacattatagccttcagaaaggccaacaaagtggg

SEQ ID NO: 191 - DNA, 3958 bp, Homo sapiens
gtcaaagtctacgtaggaagtcgtagggaaggcagcgaggaagacgctggctctcgggtcacgtgatgcgccgggagcgtcatcgcctcctccctccccaagatggcgtccttgctgcagtcggaccgggttctctatctagtccagggagaaaagaaggttcgggccccgctctcgcaactctacttctgccgctattgtagcgaactgcggtcgctggaatgtgtgtctcacgaggtggactcccattattgtcccagttgtttagaaaatatgccatcggctgaagccaaactaaaaaagaatagatgtgccaattgttttgactgtcctggctgcatgcacaccctctctactcgggccacgagcatctccacacagcttccagatgacccagccaagaccaccatgaagaaagcctattacctggcatgtggattttgtcgctggacgtctagagatgtgggcatggcagacaaatctgtagctagtggcggttggcaggaacctgaaaatcctcacacacaacggatgaacaaattgattgaatattaccagcagcttgctcagaaagagaaggttgagcgagatcgcaagaaactggcacgacgtagaaactatatgcctctggctttttcgcaacatactattcatgtagtggacaaatatggtcttggaaccaggcttcagcgaccacgagctggtgcatccatcagtacccttgccggactttcccttaaagaaggagaggatcagaaagagataaagattgagccagctcaggctgtggatgaagtggaacctctacctgaagactattatacaagaccagtaaatttaacagaggtaacaacccttcagcagcgtctgttacagcctgacttccagccagtctgtgcttcacagctctatcctcgccacaaacatcttctgatcaaacggtccctgcgctgccgtaaatgtgaacataatttgagcaagccagaatttaacccaacgtcaatcaaattcaaaatccagctggtcgctgtcaattatattccagaagtgagaatcatgtcaattcccaaccttcgctacatgaaggagagccaggtcctcctgactcttacaaatccagttgagaacctcacccatgtgactctcttcgagtgtgaggagggggaccctgatgatatcaacagcactgctaaggtggtggtgcctcccaaagagctcgttttagctggcaaggatgcagcagcagagtacgatgagttggcagaacctcaagactttcaggacgatcctgacattatagccttcagaaaggccaacaaagtgggtattttcatcaaagttacaccacagcgtgaggagggtgaagtgaccgtgtgcttcaagatgaagcatgattttaaaaacctggcagcccccattcgccccattgaagaaagtgaccagggaacagaagtcatctggctcacccagcatgtggaacttagcttgggcccacttcttccttaaaaggttccactggagggcagatcccaaaggacagtatcaccgtaaacctgcgttaaaatgtggaagctgctgcttcattaggccttgtttataacgatgtacccatgcactacggaattctattgctaagaaagtgggagcataggcaaggcattgggaacacagggtagctgctgttgctcttgctctcacccctgttgacaccagtaagtctgtgtctccctcactgaaccctgcacgttgagtaacagcagcataattccatcctaggaaaggggatgggtgttccttggaatggcattgtatttaccacctgagaaactctgtactgtctcttgatctgatctcactaaggatcacaatgtcacagatgaaacttaaatgataacccaaaggtagacctgctgttaatgatccagcattggtcacaatgtaccaactgctttctgcattccgttaaatatcatctaacagtctaaaacatatcccttcattgccataatggctgccattttgccatagatttccatataactgaaaaactgaattgtcactttatctttagtatcatgatgattggaaaaacctgtgaagttgttaaggcactctcatttgccctctttttctaagtgaatacaggacacgtattagttgttcttaatttttttcccagtaaaatatggatcttttaagaagaatttgagaagcaaacaattacatgtcatgtcaagggggtagcagattccattcgttttcaatattgccacaatacccagggattaatgctgccacaggggggcaatctttatttgtcttacttcctaccccttccctgttctgcctctttaactcagttaagttgttctgtttgggacctggaaaagaacccaaagaaaacctgagtggacaggttcatttctggaatgcagaaaacattttaaaggctagatttttagaatattctcaactagcattctttccattgatttgaaggggaaattaactattataatctcttgaatccaaaactggatattaagaactttcccccttactaagtttaagacttttgtcatgtggtgagtcaaataagaccattttgattgtaaaccataaaatagttcagcaagtagcccacagttctggcctaacagcagacttgctgttttcacttggtatcctggagttgggttgctaaccttaatttctatgatgttttctaaaatgaaacttgataaagtagaccaccagctgcaccgtgttttctgtaaaagtattgttagtaagtggccaagagacttgaggaaaatacagattttttgtttaccttggtcttgttttaagtcttaaaaaattaaagataacattataatgtagaatacagatgggacatagtccttgtaagcttcccttgaaaatgttttaaatatttaggaagcttttaaaagacactaaattgtactctaaaagacactaaattgtactaattgtacaaaggtcaagccaattttatgaaacagtcctacagagtaatatatgtgatgcagtgtaagaaggaaaatactcatctctaacattatggtaataacatttagcctcttaggagttggagcagggggatgggtaattacagatttgcagactatagaaagagtttcatttttttgtgaccccacagagtctcaaatttttatttcactacctgctagagcctactgtgaaatcactgctccatatttgccagtggaggaaatgggcatagagtagagaatagcttcatatgtttacacgtttgcatagactacacacatgtcatgcgtttatggcaggtagctggtatttattccccaaagtaataatgttgaagtatgggtctcatcattcccatacacagaaacacaaaacactttgatcataaacttttttcttcagaagccaaactaacttgcagaataatagagccactggtttaatgtttcctcaagataggttttagtgtaagctagtattctgtgtgttcgtagaaatgattcaatacctgcagctggtgaattaggaattgtatttgttgccttttttatattagatgaggtgcaaaaattttaatgctagtcagtatgcaccaccacaggaaagttagatcccattagcacttgaaactacagctttggaaacttaggctaagttaatttggatttgttacttgattcacctactgaccttttcttttgtttgaagtgcttatcagcataatgagctaagtgtcatgcatatttgtgaagaaacaccctttttggtcccttttgggacagagaggtactccttgatctttatgaatgacaggttactgttttgccttattgcttaacttaatgtagtgaaataaagcagacaaagcttgaaaaaaaaaaaaaaaaaaaaaaaaaaaaaaaaaaaaaaaaaaaaaaaaaaa

SEQ ID NO: 192 - protein, 467 aa, Homo sapiens
MASLLQSDRVLYLVQGEKKVRAPLSQLYFCRYCSELRSLECVSHEVDSHYCPSCLENMPSAEAKLKKNRCANCFDCPGCMHTLSTRATSISTQLPDDPAKTTMKKAYYLACGFCRWTSRDVGMADKSVASGGWQEPENPHTQRMNKLIEYYQQLAQKEKVERDRKKLARRRNYMPLAFSQHTIHVVDKYGLGTRLQRPRAGASISTLAGLSLKEGEDQKEIKIEPAQAVDEVEPLPEDYYTRPVNLTEVTTLQQRLLQPDFQPVCASQLYPRHKHLLIKRSLRCRKCEHNLSKPEFNPTSIKFKIQLVAVNYIPEVRIMSIPNLRYMKESQVLLTLTNPVENLTHVTLFECEEGDPDDINSTAKVVVPPKELVLAGKDAAAEYDELAEPQDFQDDPDIIAFRKANKVGIFIKVTPQREEGEVTVCFKMKHDFKNLAAPIRPIEESDQGTEVIWLTQHVELSLGPLLP

SEQ ID NO: 193 - DNA, 101 bp, Homo sapiens
gggaaagattggaggaaagatgagtgagagcatcaacttctctgacaacctaggccagctcctgtctccccccaggtgtgtggtgatgccaggcatgccct

SEQ ID NO: 194 - DNA, 2168 bp, Homo sapiens
ctttgcgagggcggagttgcgttctctttagcacacagccggagagcatcgcgagggcggagctgcgttctcctctgcacagacttcggggctattgcgaaggcggagcagagttcttctcaggtgtctgacttccagcaactgctggcctgtgccagggtgcaagctgagcactggagtggagttttcctgtggagaggagccatgcctagagtgggatgggccattgttcatcttctggcccctgttgtctgcatgtaacttaataccacaaccaggcataggggaaagattggaggaaagatgagtgagagcatcaacttctctgacaacctaggccagctcctgtctccccccaggtgtgtggtgatgccaggcatgcccttccctagcatcaggtctccagagctgcagaagacgacggccgacttggatcacactcttgtgagtgtccccagtgttgcagaggtgagaggagagtagacagtgagtgggagtggcgtcgcccctagggctctactggaccagcgtctcctgtctcctggagaggcttcgatgcccctccacaccctcttgatcttccctgtgatgtcatctggagccctgctgcttgcggtggccttataaagcctcctggtctggctccaaggcctggcagagtctttcccagggaaagctacaagcagcaaacagtccgcatgggtcatccccttcactcccagctcagagcccaggccaggggcccccaagaaaggctctggtggagaacctctgcatgaaggctgtcaaccagtccataggcaagcctggctgcctccagctgggtggacagacaggggctggagaaggggagaagaggaaagggggttgcctgccctgtctcctacctgaggctgaggagggagaaggggatgcactgttggggaggcagctgtaactcaaagccttagcctctgttcccacgaaggcagggccatcaggcaccaaagggattctgccagcatagtgctcctggaccagtgatacacccggcaccctgtcctggacaagctgttggcctggatctgagccctcgtggaggtcaaagccacctttggttctgccattgctgctgtgtggaagttcactcctgccttttcctttccctagagcctccaccaccccgagatcacatttctcactgccttttgtctgcccagtttcactagaagtaggcctcatcctgacaggcagctgcaccactgcctggcgctgtgcccttcctttgctctgcccgctggagacggtgtttgtcatgggcctggtctgcagggatcctgctacaaaggtgaaacccaggagagtgtggagtccagagtgttgccaggacccaggcacaggcattagtgcccgttggagaaaacgggaatcccaaagaaatggtgggtcctggccatccgtgagatcttcccagggcagctcccctctgtggaacccaatctgtcttccatcctgtgtggccgagggccaggcttctcactaggcctctgcaggaggctgccatttgtcctgcccaccttcttagaagcgagacggagcagacccatctgctactgccctttctataataactaaagttagctgccctggactattcaccccctagtctcaatttaaaaagatccccatggccacagggcccctgcctgggggcttgtcacctcccccaccttcttcctgagtcactcctgcagccttgctccctaacctgccccacagccttgcctggatgtctatctccctggcttggtgccagttcctccaagtcgatggcacctccctccctctcaaccacttgagcaaactccaagacatcttctaccccaacaccagcaattgtgccaagggccattaggctctcagcatgactatttttagagaccccgtgtctgtcactgaaaccttttttgtgggagactattcctcccatctgcaacagctgcccctgctaactgcccttctctcctccctctcatcccagagaaacaggtcagctgggagcttctgcccccactgcctagggaccaacaggggcaggaggcagtcactgaccccgagacgtttgcatcctgcacagctagaggtcctttattaaaagcacactgttggtttctgctcaaaaaaaaaaa

SEQ ID NO: 195 - protein, 127 aa, Homo sapiens
MSESINFSDNLGQCVVMPGMPFPSIRSPELQKTTADLDHTLVSVPSVAEGHQAPKGFCQHSAPGPVIHPAPCPGQAVGLDLSPRGGQSHLWFCHCCCVEVHSCLFLSLEPPPPRDHISHCLLSAQFH

SEQ ID NO: 196 - DNA, 103 bp, Homo sapiens
cacaaccaggcataggggaaagattggaggaaagatgagtgagagcatcaacttctctcacaacctaggccagtgtgtggtgatgccaggcatgcccttcccc

SEQ ID NO: 197 - DNA, 1652 bp, Homo sapiens
cttgccgtcagccttttctttgacctcttctttctgttcatgtgtatttgctgtctcttagcccagacttcccgtgtcctttccaccgggcctttgagaggtcacagggtcttgatgctgtggtcttcatctgcaggtgtctgacttccagcaactgctggcctgtgccagggtgcaagctgagcactggagtggagttttcctgtggagaggagccatgcctagagtgggatgggccattgttcatcttctggcccctgttgtctgcatgtaacttaataccacaaccaggcataggggaaagattggaggaaagatgagtgagagcatcaacttctctcacaacctaggccagtgtgtggtgatgccaggcatgcccttccccagcatcaggtctccagagctgcagaagacgacggccgacttggatcacactcttgtgagtgtccccagtgttgcagaggcagggccatcaggcaccaaagggattctgccagcatagtgctcctggaccagtgatacacccggcaccctgtcctggacacgctgttggcctggatctgagccctcgtggaggtcaaagccacctttggttctgccattgctgctgtgtggaagttcactcctgccttttcctttccctagagcctccaccaccccgagatcacatttctcactgccttttgtctgcccagtttcaccagaagtaggcctcttcctgacaggcagctgcagcactgcctggcgctgtgcccttcctttgctctgcccgctggagacggtgtttgtcatgggcctggtctgcagggatcctgctacaaaggtgaaacccaggagagtgtggagtccagagtgttgccaggacccaggcacaggcattagtgcccgttggagaaaacaggggaatcccgaagaaatggtgggtcctggccatccgtgagatcttcccagggcagctcccctctgtggaatccaatctgtcttccatcctgcgtggccgagggccaggcttctcactgggcctctgcaggaggctgccatttgtcctgcccaccttcttagaagcgagacagagcagacccatctgctactgccctttctataataactaaagttagctgccctggactattcaccccctagtctcaatttaagaagatccccatggccacagggcccctgcctgggggcttgtcacctcccccaccttcttcctgagtcactcctgcagccttgctccctaacctgccccacagccttgcctggatttctatctccctggcttggtgccagttcctccaagtcgatggcacctccctccctctcaaccacttgagcaaactccaagacatcttctaccccaacaccagcaattgtgccaagggccattaggctctcagcatgactatttttagagaccccgtgtctgtcactgaaaccttttttgtgggagactattcctcccatctgcaacagctgcccctgctgactgcccttctctcctccctctcatcccagagaaacaggtcagctgggagcttctgcccccactgcctagggaccaacaggggcaggaggcagtcactgaccccgagacgtttgcatcctgcacagctagagatcctttattaaaagcacactgttggtttctg

SEQ ID NO: 198 - skipped

SEQ ID NO: 199 - DNA, 108 bp, Homo sapiens
tccatagcagccttcagtccatctcctggcttcagtccttacaatgtcagtaaaacagccttgctgggcctgaccaagaccctggccatagagctggccccaaggaac

SEQ ID NO: 200 - DNA, 1264 bp, Homo sapiens
atacttgctggtctgatccatgcacaaggcggggctgctaggcctctgtgcccgggcttggaattcggtgcggatggccagctccgggatgacccgccgggacccgctcgcaaataaggtggccctggtaacggcctccaccgacgggatcggcttcgccatcgcccggcgtttggcccaggacggggcccatgtggtcgtcagcagccggaagcagcagaatgtggaccaggcggtggccacgctgcagggggaggggctgagcgtgacgggcaccgtgtgccatgtggggaaggcggaggaccgggagcggctggtggccacggctgtgaagcttcatggaggtatcgatatcctagtctccaatgctgctgtcaaccctttctttggaagcataatggatgtcactgaggaggtgtgggacaagactctggacattaatgtgaaggccccagccctgatgacaaaggcagtggtgccagaaatggagaaacgaggaggcggctcagtggtgatcgtgtcttccatagcagccttcagtccatctcctggcttcagtccttacaatgtcagtaaaacagccttgctgggcctgaccaagaccctggccatagagctggccccaaggaacattagggtgaactgcctagcacctggacttatcaagactagcttcagcaggatgctctggatggacaaggaaaaagaggaaagcatgaaagaaaccctgcggataagaaggttaggcgagccagaggattgtgctggcatcgtgtctttcctgtgctctgaagatgccagctacatcactggggaaacagtggtggtgggtggaggaaccccgtcccgcctctgaggaccgggagacagcccacaggccagagttgggctctagctcctggtgctgttcccgcattcacccactggcctttcccacctctgctcaccttactgttcacctcatcaaatcagttctgccctgtgaaaagatccagccttccctgccgtcaaggtggcgtcttactcgggatttctgctgttgttgtggccttgggtaaaggcctcccctgagaacacaggacaggcctgctgacaaggctgagtctaccttggcaaagaccaagatattttttcccgggccactggggaatctgaggggtgatgggagagaaggaacctggagtggaaggagcagagttgcaaattaacaacttgcaaatgaggtgcaaataaaatgcagatgattgcgcggctttgaatccaa

SEQ ID NO: 201 - protein, 278 aa, Homo sapiens
MHKAGLLGLCARAWNSVRMASSGMTRRDPLANKVALVTASTDGIGFAIARRLAQDGAHVVVSSRKQQNVDQAVATLQGEGLSVTGTVCHVGKAEDRERLVATAVKLHGGIDILVSNAAVNPFFGSIMDVTEEVWDKTLDINVKAPALMTKAVVPEMEKRGGGSVVIVSSIAAFSPSPGFSPYNVSKTALLGLTKTLAIELAPRNIRVNCLAPGLIKTSFSRMLWMDKEKEESMKETLRIRRLGEPEDCAGIVSFLCSEDASYITGETVVVGGGTPSRL

SEQ ID NO: 202 - DNA, 105 bp, Homo sapiens
gagcgaactgtcctccgctacatgacagatgggatgcttctccgggagttcctctctgagcctgacctggcgagttacagcgtggtgatggtggatgaggcacac

SEQ ID NO: 203 - DNA, 3406 bp, Homo sapiens
gcggtacgggaagacagctttgggatgtcggaagatcctagaggtcccaaggtagctgacttgcgaagctgaggctccagccgagggctccaggcctctgaccggcccagcagtgagcgcggctgcccgacgcttcagggccgggagcagggagcgtgagtcgccatggcgacgccggcgggtctggagcgctgggttcaggacgagctgcactcggtgttggggctgagcgagcggcacgtcgcccagtttctgatcggtaccgcacagcgctgcacctctgccgaggagttcgtgcagcgcctacgagacactgataccttggatctcagtgggccggcccgggacttcgccctgagactctggaacaaggtaccacgaaaggcagtggtagaaaagccagctcgggcagcagagcgagaggcccgggccctgctggagaagaaccgatcttataggttactggaagacagtgaagagagcagtgaggagactgtgagtagggctggaagcagcctccagaagaaacgtaaaaagcggaaacacctcaggaagaagcgtgaggaagaagaggaggaagaggcttctgagaaagggaagaagaaaacaggggggagtaaacagcagacagagaagccagagtcggaagatgagtgggaacggacagagcgtgaacgccttcaggacctggaggagcgtgatgcctttgctgagcgggttcgacagcgggacaaggatcggactcgaaatgtcctggaacggtcagacaagaaggcttatgaagaggctcagaagcgcctcaagatggccgaggaagaccggaaggccatggtccctgagctgcggaagaaatctcgccgagagtacctggctaagcgggagcgagagaagcttgaggacctggaggcggagctggctgatgaggagttcctttttggggacgtggagctgagccggcacgagcggcaggagctcaaatataagcggcgagtgcgggatctcgcccgggagtaccgggcagctggggagcaggagaagctggaggccaccaatcgctaccacatgcccaaggaaacccgaggacagccagcccgagctgtggatctagtggaggaggaatcaggagcccctggggaggagcagcggcgctgggaggaggcgcggcttggggcagcgtccctgaagtttggggcccgagatgctgcctctcaggagcccaagtatcaactggtgctggaggaggaggagaccattgagtttgtccgggccactcagctccagggtgatgaggagccgtcagctccacccacttcaactcaggcccagcagaaagagtccatccaggccgtccgccgcagcctcccggtgttcccatttcgagaggagctcctggctgctattgcaaatcaccaagtcctcatcattgaaggcgagacaggctcagggaagaccacccagatcccgcagtatctctttgaggagggttatacaaacaagggtatgaagattgcctgcacccaaccccggagagtggctgccatgagtgtggccgcccgagtggcccgggagatgggtgtgaagcttgggaatgaggttggctacagcatccgctttgaggactgcacatcagagcgaactgtcctccgctacatgacagatgggatgcttctccgggagttcctctctgagcctgacctggcgagttacagcgtggtgatggtggatgaggcacacgaaaggaccctacacacagacattctctttggattgatcaaggatgttgctcgcttccgacctgagctcaaggtcctggtggcttcagccacaatggacactgcccgtttttccaccttctttgatgacgcccctgtgtttcgaatccccggacgcaggtttcctgtggacatcttctacaccaaggctccagaggctgactacttggaagcttgtgtagtatctgtgttgcagatccatgtgacccagccccctggggatatcctggtgttcctgacaggacaggaggagattgaggctgcctgtgagatgctccaggatcgctgccgccgcctgggctccaaaatccgggagctcctggtgctgcccatttatgccaatctgccctctgacatgcaggcccgtatcttccagcccacaccacctggggcacgaaaggtggttgtggcaacgaacattgctgagacatcactcaccattgagggcatcatttatgtgctggatccagggttctgtaagcagaagagctacaacccccgcacaggcatggaatcgctcactgtcacaccctgcagcaaggcctcagccaatcagcgagctggcagggcaggtcgggtggctgcagggaagtgcttccgcctgtataccgcctgggcctatcagcacgagcttgaggaaaccacagtgcctgagatccagaggaccagcttgggcaatgtcgtgttgctgctcaagagcttagggatccatgacctaatgcactttgatttcctggaccctccaccatatgagacactgctgctggctttggagcagctgtatgctctgggagccctcaaccaccttggggagctcaccacgtctggtcgaaagatggcagagctgccggtggaccccatgctgtccaaaatgatcttagcctctgagaagtacagctgttcagaggagatcctgacagtggctgccatgctctctgtcaacaactccatcttctaccgaccaaaggacaaggtcgtccatgctgacaatgcccgtgtcaacttctttctccctggcggtgaccacctggttctgctaaatgtttacacacagtgggctgagagtggttactcttcccagtggtgctatgagaactttgtacagttcagatcgatgcgccgagcccgggatgtgcgggaacagctggaagggctcttggaacgtgtggaagttggtctcagttcctgccagggggactatatccgtgtacgcaaggccatcactgctggttacttttaccacacggcacggttgactcggagtggctaccgcacagtgaaacagcagcagacagtcttcattcatcccaactcctccctctttgagcaacagccacgctggctgctctaccacgaacttgtcttgaccaccaaagagttcatgagacaggtactggagattgagagcagttggcttctggaggtggctccccattattataaggccaaggagctagaagatccccatgctaagaaaatgcccaaaaaaataggcaaaacacgagaagagctagggtaagagaaggacgtaaacagaacctgacaccagctccttttccttctatacattatttaatacctattaaataaaattatttttggaataaagcttgtgggaacatttgggatctaga

SEQ ID NO: 204 - protein, 1041 aa, Homo sapiens
MATPAGLERWVQDELHSVLGLSERHVAQFLIGTAQRCTSAEEFVQRLRDTDTLDLSGPARDFALRLWNKVPRKAVVEKPARAAEREARALLEKNRSYRLLEDSEESSEETVSRAGSSLQKKRKKRKHLRKKREEEEEEEASEKGKKKTGGSKQQTEKPESEDEWERTERERLQDLEERDAFAERVRQRDKDRTRNVLERSDKKAYEEAQKRLKMAEEDRKAMVPELRKKSRREYLAKREREKLEDLEAELADEEFLFGDVELSRHERQELKYKRRVRDLAREYRAAGEQEKLEATNRYHMPKETRGQPARAVDLVEEESGAPGEEQRRWEEARLGAASLKFGARDAASQEPKYQLVLEEEETIEFVRATQLQGDEEPSAPPTSTQAQQKESIQAVRRSLPVFPFREELLAAIANHQVLIIEGETGSGKTTQIPQYLFEEGYTNKGMKIACTQPRRVAAMSVAARVAREMGVKLGNEVGYSIRFEDCTSERTVLRYMTDGMLLREFLSEPDLASYSVVMVDEAHERTLHTDILFGLIKDVARFRPELKVLVASATMDTARFSTFFDDAPVFRIPGRRFPVDIFYTKAPEADYLEACVVSVLQIHVTQPPGDILVFLTGQEEIEAACEMLQDRCRRLGSKIRELLVLPIYANLPSDMQARIFQPTPPGARKVVVATNIAETSLTIEGIIYVLDPGFCKQKSYNPRTGMESLTVTPCSKASANQRAGRAGRVAAGKCFRLYTAWAYQHELEETTVPEIQRTSLGNVVLLLKSLGIHDLMHFDFLDPPPYETLLLALEQLYALGALNHLGELTTSGRKMAELPVDPMLSKMILASEKYSCSEEILTVAAMLSVNNSIFYRPKDKVVHADNARVNFFLPGGDHLVLLNVYTQWAESGYSSQWCYENFVQFRSMRRARDVREQLEGLLERVEVGLSSCQGDYIRVRKAITAGYFYHTARLTRSGYRTVKQQQTVFIHPNSSLFEQQPRWLLYHELVLTTKEFMRQVLEIESSWLLEVAPHYYKAKELEDPHAKKMPKKIGKTREELG

SEQ ID NO: 205 - DNA, 104 bp, Homo sapiens
cgtgccggaaatccagagaaccaacttagcaagcacagtgctgtcactcaaggccatgggtatcaatgatctgctgtcctttgatttcatggatgccccaccta

SEQ ID NO: 206 - DNA, 5549 bp, Homo sapiens
aacccggccggagtagctctgagcgccggctgtgaggaaggaggttctgggcaagctatagccatggctgtggctgtagccatggcgggagccttaatcgggtcggagccaggccccgcggaagaacttgccaaactcgagtacctgtctttggtgtcaaaggtttgcactgagctggacaatcacttggggatcaacgacaaggaccttgctgaatttgtgatcagtcttgctgagaaaaataccacctttgatacttttaaggcttctctcgtcaaaaatggtgcagaatttacggattctcttattagtaacttgctgcgtctcatacaaaccatgcggcctccagcgaagccttccactagcaaagatccagttgttaaacctaaaacagaaaaagaaaagctgaaggaactcttcccagtcctttgccaaccggacaacccttctgttcggaccatgttggatgaagatgatgtgaaagttgctgtggatgtcctgaaagaactggaagctttaatgcccagcgcagcaggccaggagaagcaaagagatgctgaacaccgggacaggacaaagaagaagaagcggagtcgaagccgagatcgaaaccgagatcgagacagagatagggaacgaaaccgagatagagaccacaagcggagacaccgatcccgctctcgatcacgttccaggacccgggagaggaataaagtgaagtctagatatcggtccaggagcaggagtcagagtccccccaaagaccggaaggaccgggacaaatatggagagcggaatctggatagatggcgggataagcatgtggaccgccctcctccagaagagcccaccattggtgacatttataatggcaaagttaccagcatcatgcagtttggttgctttgtgcagctggaaggactaaggaagcggtgggaaggcctggtgcacatctctgagctccggcgggagggtcgtgtggccaatgtagctgatgtcgtgagcaaaggccagagggtcaaagtcaaagtgctgtccttcactgggaccaagaccagcctgagcatgaaggatgtggatcaagagactggagaagatctaaacccaaatagacggcgaaatcttgtcggggagaccaatgaggagacctcaatgcggaatcctgatagacccactcacttgtcccttgtcagtgctcctgaagtagaggacgactcactggaacgcaagcgcctcacccgaatctctgacccagagaagtgggagatcaaacagatgattgctgccaatgtcctttccaaagaagaatttccagactttgatgaagagactggcattctccctaaggtggatgatgaagaagatgaggaccttgagattgaattggttgaggaagagcctccattcctgagagggcacactaagcaaagcatggacatgagccccattaaaattgtcaagaacccagacggctccctctcccaagcagcaatgatgcagagtgccttggccaaagaaaggcgggaactcaaacaggcccagcgggaagctgagatggattctattcccatgggactcaacaaacactgggttgaccctctgcctgatgcggaaggcagacagattgctgccaacatgaggggtattgggatgatgcccaatgatattcctgagtggaagaagcatgcctttgggggcaacaaagcctcttacggaaaaaagacccagatgtcaatccttgagcagagggagagcctgcccatctacaaactgaaggagcaattggtccaggccgtccatgacaatcagatcctgattgtcattggtgagacaggatctggaaagacaacacagatcacccagtacctggcggaggcaggctacacttccaggggcaagattgggtgtacccagcccagaagagtggcagctatgtcggtggccaaaagagtgtcagaggagtttggttgttgcttaggccaagaggtgggctacaccattcgatttgaggactgcactagccctgaaacagtcatcaagtacatgacagatgggatgttgcttagagagtgcttgattgaccctgacctcactcagtacgcgatcatcatgttggacgaggcacatgagaggacaattcacactgatgtgctctttggattgttgaaaaagacagttcagaaacggcaggacatgaagctgattgtcacctcagccaccttggatgcagtgaagttttctcaatacttctatgaagctcccattttcaccatcccaggtcgaacatatccagtggaaatactgtacacaaaggaacctgagacagattatctggatgccagcctgattactgttatgcagattcatttaacagaaccaccaggtgatatcctggtcttcctgactggtcaggaagaaattgatactgcttgtgagatcctgtatgaaagaatgaaatccctgggacctgatgttccagagttaattatcctcccagtgtactctgctcttcccagtgagatgcagacccgaatctttgacccagctccaccaggcagcagaaaggttgtgattgccaccaatatcgcagagacatcgctgactattgatggtatctactatgtggtggacccaggattcgtgaaacagaaagtttacaattccaagacagggattgaccagctcgtggtgacgcctatttctcaggctcaggcaaagcaacgagctggcagagctgggagaacaggcccagggaagtgttacaggttgtacacagaacgtgcctaccgagatgaaatgctgaccaccaacgtgccggaaatccagagaaccaacttagcaagcacagtgctgtcactcaaggccatgggtatcaatgatctgctgtcctttgatttcatggatgccccacctatggaaactttgatcacagccatggagcagctgtacacactgggggccctggatgacgagggcctgctcactcgcttgggccgccggatggcagagttccctctggagccaatgctatgcaaaatgctcatcatgtctgtgcatctgggctgcagtgaggaaatgctgaccattgtatccatgctgtctgtgcagaacgtcttctataggcccaaggataaacaagcccttgcagatcagaagaaggccaaattccaccagactgaaggggaccacctcaccctgctagctgtgtacaactcctggaagaacaacaagttctccaacccatggtgctatgagaactttatccaggctcgttccctgcgccgggcccaggacattcgcaagcagatgttaggcataatggacagacacaagctggatgttgtttcctgtggcaagtccacagtccgagtgcagaaggccatctgcagtgggttcttccgtaatgctgccaagaaagacccgcaggagggttaccggacactgatcgaccagcaggtggtctatatccatccttccagtgccctcttcaacagacagccagaatgggtggtgtaccatgagctggtgctcaccaccaaggaatacatgcgtgaagttaccaccatcgaccctcggtggcttgtggagtttgccccagccttcttcaaggtctcagacccaactaagctaagcaaacagaagaagcaacagcgtcttgaacccttgtacaaccgctatgaggaacccaatgcctggagaatatctcgagctttccgacggcgctgaaaggcaagattgttcctttgcctctccagcagcagtagccagggcttggacttatcgatgacaggctggtcctgaggatacagctgtcccgtgactgactgtcttaactgagcattttctcaactcgactctcatttcttccctgctggtaaaatagaaacagggatttaaacctggctttggcaagagcctgcagcctccatcaccccaagtccttgggcccagttgggagctcatatctaacacagagacacattgcatcaacttcaagaaagggacaatttgtgcagctccaggatgggaaggtggagtgggtgagcatcttgtgcagggacatggtgagtgccctgatgccccagctagcaggagctactgtgctcatctaaagtgtttgccccacttcccaccccgtctccagcccctgtactttggcttgacctcgtggaaatatttattttcttaaggaaacaaaaatggttttctgtgactgttttcttttagccgaaaggttaggatattggcctgggctcagggtgagggagatttagtatctgtgctctggcacacatgatgagaatcccctgaatcccctgaaaccagaacgcagggcctctttgcgctcggaaacgacgtacaacccagacttccagccttgtctttcagcatcagcactagccgggccgtgctgggggatcacccgatgatcaaccatgtcctctccacagagcacttcagtctggaggcctgagtggctacagatggcacatattaaatacagaaggtttccccttgctccctccacctcccacattcgcaatgtgcagcatgtcccatttccttttgaaacatactaagtaacaacacagcttttattttattttgtttttatttttttcccctgaggtcctggatggactttaacaaagggattttatggtcaaaacctccctttccccactccaaacagaaaacaaacataacacctctcctctcagctggtttgtgctgccagtatctgtgctgcagggcttgttcttagtggttttttcctagcacttgcttggagaatagccacctccttgtgccctcctcacagctcctgaggagggttttttttttttcttcccatagagatgggttcccactgtgctgcccaggctgctctccaatccctggcgtcaagcaatcctcctgcctctgcctcccaaagcgctgggattacagttgagagccactgtcctctgcactgaggaggctccttacctggcggaacatcaggcaggtcttgccaggccaggtttcggaacttacggaaagctggtctggatgtagtgcttgtagagaagcttctgagagattgggcacatcctgttacgttgctgcttctcctgtccttatgttattagtaagttctgaagtgatgtaaatgctagaactactgtagaactgtatgccagacactaagagagactatgtaacattccaggatataaaggaatgtatgttgtcactgggcagcaaaccacaccctaaagacaattcagaaagagtccgagggagaggaatataggccaggcaatctgctggctgcagatccctgccccttcattaagctgagtgcctcctgattctgtctgagtattcgcctttgtaagcccaggccagtaatcaaggggcagggcattgttgtgtgttaaccttgaaggccttctggggagagacagtacagggacctcaaatgaaaccaaaggggaaacggggactgggcacccacctccccaatctcgttttgtttttgtttttgttaagacaggatcttgcca

SEQ ID NO: 207 - protein, 1220 aa, Homo sapiens [sequence omitted]

SEQ ID NO: 208 - DNA, 107 bp, Homo sapiens
gatatgcaggcgtcacaaagactgtgagggcttcttccgggccaccgtgctgacaccaggggacatggagaatgacgctgagtgtggcccttgcctccctggctact

SEQ ID NO: 209 - DNA, 4073 bp, Homo sapiens
cttgaatttcctgtgatgtgctaaaaccccagccccccaccaccacatcaatgcacagagcagtcacacctctcctacatcaaaccccaattactacacacccagggaaggtgcccagctctcccactgcagcagtcacccaaatgagaaggaaggaggcatacagacacccaaaggtgagcccttgggagaggatggcccatgtgggggactgcacgcagacgccctggctccccgtcctggtggtgtctctgatgtgctcagcccgagcggaatactcaaactgcggtgagaacgagtactacaaccagactacggggctgtgccaggagtgccccccgtgtgggccgggagaggagccctacctgtcctgtggctacggcaccaaagacgaggactacggctgcgtcccctgcccggcggagaagttttccaaaggaggctaccagatatgcaggcgtcacaaagactgtgagggcttcttccgggccaccgtgctgacaccaggggacatggagaatgacgctgagtgtggcccttgcctccctggctactacatgctggagaacagaccgaggaacatctatggcatggtctgctactcctgcctcctggcaccccccaacaccaaggaatgtgtgggagccacttcaggagcttctgccaacttccctggcacctcgggcagcagcaccctgtctcccttccagcacgcccacaaagaactctcaggccaaggacacctggccactgccctgatcattgcaatgtccaccatcttcatcatggccatcgccatcgtcctcatcatcatgttctacatcctgaagacaaagccctctgccccaggtgacggcccccatgcgccggtgccctgcttcctggactctccgtcaactccccctgtcggagagcctggctgctcactccctcctctctccccagcctgttgcaccagccacccggggaagagcgtggaggcccaagtgagcaaggacgaggagaagaaagaggccccagacaacgtggtgatgttctccgagaaggatgaatttgagaagctgacagcaactccagcaaagcccaccaagagcgagaacgatgcctcatccgagaatgagcagctgctgagccggagcgtcgacagtgatgaggagcccgcccctgacaagcagggctccccggagctgtgcctgctgtcgctggttcacctggccagggagaagtctgccaccagcaacaagtcagccgggattcaaagccggaggaaaaagatcctcgatgtgtatgccaacgtgtgtggagtcgtggaaggtcttagccccacggagctgccatttgattgcctcgagaagactagccgaatgctcagctccacgtacaactctgagaaggctgttgtgaaaacgtggcgccacctcgccgagagcttcggcctgaagagggatgagattgggggcatgacagacggcatgcaactctttgaccgcatcagcacggcaggctacagcatccctgagctactcacaaaactggtgcagattgagcggctggatgctgtggagtccttgtgtgcagacatactggagtgggcgggggttgtgccacctgcctcccagccacatgctgcatcctgaaaagcatgcctgtgggctgtcctcccaggacaagccaaggagccaacgagggctctggagctgtgagtggtgccaaaagactgccaagaatcaaggcttttgtgatatgtcaccgtatgccttaggatgttcaaggagccagacgaaataaggcctgtcttccaatttaaccaaagataaaggactagagccgggatactttcagatgctcgcctgtacctcaccaggcagagtaaatatctactcactcatacagccagcccaccagcccaccattaactcactgaacaatgagacaatgttgaggactcaaatgaatcaaaccccgtgggaatgacagaagtgaagaatctggtccctgtctttaaggagtttgcactccagtagaagacagaaggaacgtatgtttacaaaccacttcactggaagacgtcaaacaagctgaatgaaggggcgcttagaaaacgttaatagaagttctaagcgggagatgactccctactgggatgatgaaggatggcatcctagtgaagaagcagctcaaacattttgataaaatggcaacaaaatgcagacaccctgctccaggtattatttcaggtttagtacaagtctgttaataccctatgtggtttcattaggataactttttacctatccttgaggtcatccatattcttacaggccttccagtcaataatggaagagctcactctatacaaaaccaatatgcaaggcatgtgtttgtccaagcaattggatgtgtgcagtagccaatttcatttactgcattactctttggcctgggaaccctgtggtctgcactacatgtgaatggccttccacttcagtcttaggcagatttgaccttttaggggcagcaatgctgaaggacacagcaatttaaattataatgtgtcaggctgtgttttcacttcaaacatgtatgagtagtcagctgtaattagagaaatgatgacttcctaagagttcagccacgcataattctagatttcaagagcatctaagacttgtggattagcctcatggcatgagagtttcagactcagccttctgagccagtcagggaaagtggagttctgcagcgcaaatgagagcctgggcttgatgtcgagggagctggcttctagttgtgccaccttgggccttgtcttttcctctctctgcctcagtttctcgtctgccaatgagatgttagttagtgattctataattggggcaggtagggttcaggtgagcaaaaagaaagtggagctataggaaatgccaggcctttgaggtgctctatggaagtcaacacagtgtggtttgtccatttaaatgggaataaaaacagaaaaactcagacttggcattttcacaataactgcaatggtttgacataacatttataggcagaaagttaataaactggcattgttcttggcatattattgtactatccctgtaactgccaagagctcaggagccaggctagtgatcacaccaggggttagagttcactgctgaactccctgatggcaggtctgtgtttattactacattaaaacaaagtctctgacttataaagcgaggttgtaaaaattacaagttgcatgactgaaaaaatgctttagggggaaaatcagtcatatctttaacaccaacaagcaatttcccaccaacgaatgtagtacatactgtgagaggatcataatgaggtcctgaatatttaatatcatcatttactgtgtctgtttgctgctgtttttcgaacctatttggtttaccctgcaagctaaatactccacggcagagcttaattatccttttaattcctctttgaaatcctgtggtgcccccttccccctgccttgtgatgatgatgagtgagtctccccttaattagactgcaaatgtcacttgtgatgagtgtgccattccaggataacagcttgcaccctcctcagaatgttttcagcgaaagagtggggtggctgttctctgctcctggtgctttggcctcatttcacactattagaattctggggctgtaaggccagccagtgtcagctcatgttccattggctctccacctgccatttttagggagctattccttatatagttacaaattcccttgtcatttacttatttggaaacatgggatttactctgacaagctttagcctatgttatgggattcagaacaatgagatcataataattctcactgaccaaagctgggactccatcctgccatttttgtgtggagatattcataattctgcaatactttaaaacatttagaaaacaccccagggtaggtctgtggcccttagacagtgaagtcttaattgtcaatattatttttgtctaattctgtatatatataacttattatattttataatctcaataaacacattaataaga

SEQ ID NO: 210 - protein, 528 aa, Homo sapiens
MHRAVTPLLHQTPITTHPGKVPSSPTAAVTQMRRKEAYRHPKVSPWERMAHVGDCTQTPWLPVLVVSLMCSARAEYSNCGENEYYNQTTGLCQECPPCGPGEEPYLSCGYGTKDEDYGCVPCPAEKFSKGGYQICRRHKDCEGFFRATVLTPGDMENDAECGPCLPGYYMLENRPRNIYGMVCYSCLLAPPNTKECVGATSGASANFPGTSGSSTLSPFQHAHKELSGQGHLATALIIAMSTIFIMAIAIVLIIMFYILKTKPSAPGDGPHAPVPCFLDSPSTPPVGEPGCSLPPLSPACCTSHPGKSVEAQVSKDEEKKEAPDNVVMFSEKDEFEKLTATPAKPTKSENDASSENEQLLSRSVDSDEEPAPDKQGSPELCLLSLVHLAREKSATSNKSAGIQSRRKKILDVYANVCGVVEGLSPTELPFDCLEKTSRMLSSTYNSEKAVVKTWRHLAESFGLKRDEIGGMTDGMQLFDRISTAGYSIPELLTKLVQIERLDAVESLCADILEWAGVVPPASQPHAAS

SEQ ID NO: 211 - DNA, 104 bp, Homo sapiens
atgatgatgaaatccagtttgacgatattggagatgatgatgaagacattgatgatatctaaattgaaccaagtgtttttacatgacaagttctctgaggatgg

SEQ ID NO: 212 - DNA, 1339 bp, Homo sapiens
gcgcacccacctgctgcatcttagttcagtcggctcttagagtagtaaccgccagaaaggagtcggaagaggtctcacgaggctgtcatcaccgccatgcccaagaataaaggtaaaggaggtaaaaacaggcgcaggggtaaaaatgagaatgaatctgaaaaaagagagttggtgtttaaagaggatggacaagagtatgctcaggtaatcaaaatgttgggaaatggacgattggaagcattgtgttttgatggtgtaaagaggttatgccatatcagagggaaattgagaaaaaaggtttggataaatacatcagacattatattggttggtctacgggactatcaggataacaaagctgatgtaattttaaagtacaatgcagatgaagctagaagcctgaaggcatatggcgagcttccagaacatgctaaaatcaatgaaacagacacatttggtcctggagatgatgatgaaatccagtttgacgatattggagatgatgatgaagacattgatgatatctaaattgaaccaagtgtttttacatgacaagttctctgaggatggttctacagttgggattttggccatcatcaaccaagaagagaaattcatttagtgtgtagtttctgaaagcaaactgatttattttcattgttttaaagtatttatttctttaaaagctgaggacactgaattaccttaagttaaatgttaatactttattgttttgatgtaatggaacttaaggataaaagaccataatatttgctgttaaaataaataaacgagtgcctttcctactgtgataacgtcaagtaattggatattttgaatacatttctgcctgataatcatgctgggttctaataagccctacttccacctaatctgtttacagtcttttggtatgtttcagttacttagatggtctcataaggtttctgatacaatttgaagacagaaatctgcatttagaatcagaaaacatggacatatttttcatatttatctagtcatatgtaattttatgctaacattgatagtttataaatccttttcatcctttgtgcctcggttattaaggaaaaaaaaatgtccaacatacagtttttaaagtgtggcagttttgagtagtaacttagaatgtataagattaagagttaaagaaaccgaacaataagtggcaaccaattatcttaacattggaaatactggggtgccattttgttttcaaaagttattcattgtaatccactgttttggctttcatgaacaagtaaattacagtgtataaatgaaaagcaatttcataataaattctataaactga

SEQ ID NO: 213 - protein, 144 aa, Homo sapiens
MPKNKGKGGKNRRRGKNENESEKRELVFKEDGQEYAQVIKMLGNGRLEALCFDGVKRLCHIRGKLRKKVWINTSDIILVGLRDYQDNKADVILKYNADEARSLKAYGELPEHAKINETDTFGPGDDDEIQFDDIGDDDEDIDDI

SEQ ID NO: 214 - DNA, 105 bp, Homo sapiens
attaacaagattggaaccaaccagatggctgtgtgtgccaaagcacagaacaaacctttctatgtggttgcagaaagtttcaagtttgtccggctctttccacta

SEQ ID NO: 215 - DNA, 2397 bp, Homo sapiens
gcgccggaagtggggtgcggaggtgtgcagcgcgctgtcagactggctcgcaggcggcgcggccggcggacccgttcgagacagcgcgggcggctcgggtcccctggggctccgcagcaggaggacgccatggacgacaaggagttaattgaatactttaagtctcagatgaaagaagatcctgacatggcctcagcagtggctgccatccggacgttgctggagttcttgaagagagataaaggggagacaatccagggtctgagggcgaatctcaccagtgccatagaaaccctgtgtggtgtggactcctctgtggcagtgtcctctggcggggagctcttcctccgcttcatcagtcttgcctccctggaatactccgattactccaaatgtaaaaagatcatgattgagcggggagaactttttctcaggagaatatcactgtcaagaaacaaaattgcagatctgtgccatactttcatcaaagatggagcgacaatattgactcacgcctactccagagtggtcctgagagtcctggaagcagccgtggcggccaagaagcgatttagtgtatacgtcacagagtcacagcctgatttgtcaggtaagaaaatggccaaagccctctgccacctcaacgtccctgtcactgtggtgctagatgctgctgtcggctacatcatggagaaagcagatcttgtcatagttggtgctgaaggagttgttgaaaacggaggaattattaacaagattggaaccaaccagatggctgtgtgtgccaaagcacagaacaaacctttctatgtggttgcagaaagtttcaagtttgtccggctctttccactaaaccagcaagacgtcccagataagtttaagtataaggcagacactctcaaggtcgcgcagactggacaagacctcaaagaggagcatccgtgggtcgactacactgccccttccttaatcactctgctgtttacagacctgggcgtgctgacaccctcagcagtcagcgatgagctcatcaagctctatctgtaacctgtgagccctttcctgccaaggtgcagcttacgtagttgaggcagggtgagtagctgcttgacaccccagtgagtcaggccaaaactgagatgtgtttaatgaagatttatggagtaaggacttaaaatcatacatcttggagaacctttcttactcatttcagtcccatctaaaaatgtgtcagctattctaaatcccaacttaaattgttcttacggtttctagaaactttccttttcagtttccagaaatacaagttagataattggctacttaactgatgaaagatgagcccaagtccacctgtcttcatcctcccctgcactccagactgatctgcctaaagcacgcgagatgcaggcgaaaagcagccacacccctctgccacaaatgaccaacagctggtcaggacgttacacgcggtgccttgtaagaggcaagaaacacttgctgaatctgcatctggcttccagtggtaagcacattcctcagcaggatcaagccaaacagtaaaaactaccaagagaacacgaggaaggcagaaacgatgtttagcaacagtattctgcatggttcactgcttaagaaaatgccttctggaatatttgtaaactgaaattctgtatgtgtaagagatgtttaaatatgtttgggtcctaaacagctttttaaaattatacttgggaataaattcagcatcttttcaaataaactctatgaaagacgctgatgtggtgttgcatcaatactgcaagctgaccaggccatctaggggaaaacactgtccagctacatttacacacttaagacccaggcaatcaggacaccatttattcaacaggaggcataaaaactataattctctttcccggaatatgacttaatccctctgtttttcagctattcaccaataaaacaatactgtgactattaacacagaaaaaccccagcacattagccacccctgcaggacatcaaaggataactgaagcccagggccaagcacattcaggaggtcaaatgcctgaagatactgaggaatggttttgaaaatcagaagtcaagaagacttctgtatctttatgtttaaaaataactataaaatagcctcagaaaaaagagcttatatatatatatatatatatatatatatatatatatatatatatataatatgtacatatgtctatatgtgacccatcatgataaatactgacatctattatttacactcaaataattttacattttcttctgttagactactccaagactggaattgttttgttttgttgtttttaatgagagggtctcgctgtgttcccaggctggtcttgaactcctggg

SEQ ID NO: 216 - protein, 305 aa, Homo sapiens
MDDKELIEYFKSQMKEDPDMASAVAAIRTLLEFLKRDKGETIQGLRANLTSAIETLCGVDSSVAVSSGGELFLRFISLASLEYSDYSKCKKIMIERGELFLRRISLSRNKIADLCHTFIKDGATILTHAYSRVVLRVLEAAVAAKKRFSVYVTESQPDLSGKKMAKALCHLNVPVTVVLDAAVGYIMEKADLVIVGAEGVVENGGIINKIGTNQMAVCAKAQNKPFYVVAESFKFVRLFPLNQQDVPDKFKYKADTLKVAQTGQDLKEEHPWVDYTAPSLITLLFTDLGVLTPSAVSDELIKLYL

SEQ ID NO: 217 - DNA, 107 bp, Homo sapiens
acaagtttgattacaaggcccatcagcgacagctgaccccgcctgagggctcctcaaagtctgagcaagaccaggcagaaaatgagggcgaggactcggctgtgttg

SEQ ID NO: 218 - DNA, 3096 bp, Homo sapiens
agtgtagttagtcggcgcttcccggaagtgacgcgaggacccgccttctctctcggcgtttccgctgtcagggccctgcggtgtgactcgcgggctcagctggtccggccgtagcacctccgcgccgtcgccatgtcgcggtttttcaccaccggttcggacagcgagtccgagtcgtccttgtccggggaggagctcgtcaccaaacctgtcggaggcaactatggcaaacagccattgttgctgagcgaggatgaagaagataccaagagagttgtccgcagtgccaaggacaagaggtttgaggagctgaccaaccttatccggaccatccgtaatgccatgaagattcgtgatgtcaccaagtgcctggaagagtttgagctcctgggaaaagcatatgggaaggccaaaagcattgtggacaaagaaggtgtcccccggttctatatccgcatcctggctgacctagaggactatcttaatgagctttgggaagataaggaagggaagaagaagatgaacaagaacaatgccaaggctctgagcaccttgcgtcagaagatccgaaaatacaaccgtgatttcgagtcccatatcacaagctacaagcagaaccccgagcagtctgcggatgaagatgctgagaaaaatgaggaggattcagaaggctcttcagatgaggatgaggatgaggacggagtcagtgctgcaactttcttgaagaagaaatcagaagctccttctggggagagtcgcaagttcctcaaaaagatggatgatgaagatgaggactcagaagattccgaagatgatgaagactgggacacaggttccacatcttccgattccgactcagaggaggaagaagggaaacaaaccgcgctggcctcaagatttcttaaaaaggcacccaccacagatgaggacaagaaggcagccgagaagaaacgggaggacaaagctaagaagaagcacgacaggaaatccaagcgcctggatgaggaggaggaggacaatgaaggcggggagtgggaaagggtccggggcggagtgccgttggttaaggagaagccaaaaatgtttgccaagggaactgagatcacccatgctgttgttatcaagaaactgaatgagatcctacaggcacgaggcaagaagggaactgatcgtgctgcccagattgagctgctgcaactgctggttcagattgcagcggaaaacaacctgggagagggcgtcattgtcaagatcaagttcaatatcatcgcctctctctatgactacaaccccaacctggcaacctacatgaagccagagatgtgggggaagtgcctggactgcatcaatgagctgatggatatcctgtttgcaaatcccaacatttttgttggagagaatattctggaagagagtgagaacctgcacaacgctgaccagccactgcgtgtccgtggctgcatcctaactctggtggaacgaatggatgaagaatttaccaaaataatgcaaaatactgaccctcactcccaagagtacgtggagcacttgaaggatgaggcccaggtgtgtgccatcatcgagcgtgtgcagcgctacctggaggagaagggcactaccgaggaggtctgccgcatctacctgctgcgcatcctgcacacctactacaagtttgattacaaggcccatcagcgacagctgaccccgcctgagggctcctcaaagtctgagcaagaccaggcagaaaatgagggcgaggactcggctgtgttgatggagagactgtgcaagtacatctacgccaaggaccgcacagaccggatccgcacatgtgccatcctctgccacatctaccaccatgctctgcactcgcgctggtaccaggcccgcgacctcatgctcatgagccacttgcaggacaacattcagcatgcagacccgccagtgcagatcctttacaaccgcaccatggtgcagctgggcatctgtgccttccgccaaggcctgaccaaggacgcacacaacgccctgctggacatccagtcgagtggccgagccaaggagcttctgggccagggcctgctgctgcgcagcctgcaggagcgcaaccaggagcaggagaaggtggagcggcgccgtcaggtccccttccacctgcacatcaacctggagctgctggagtgtgtctacctggtgtctgccatgctcctggagatcccctacatggccgcccatgagagcgatgcccgccgacgcatgatcagcaagcagttccaccaccagctgcgcgtgggcgagcgacagcccctgctgggtccccctgagtccatgcgggaacatgtggtcgctgcctccaaggccatgaagatgggtgactggaagacctgtcacagttttatcatcaatgagaagatgaatgggaaagtgtgggaccttttccccgaggctgacaaagtccgcaccatgctggttaggaagatccaggaagagtcactgaggacctacctcttcacctacagcagtgtctatgactccatcagcatggagacgctgtcagacatgtttgagctggatctgcccactgtgcactccatcatcagcaaaatgatcattaatgaggagctgatggcctccctggaccagccaacacagacagtggtgatgcaccgcactgagcccactgcccagcagaacctggctctgcagctggccgagaagctgggcagcctggtggagaacaacgaacgggtgtttgaccacaagcagggcacctacgggggctacttccgagaccagaaggacggctaccgcaaaaacgagggctacatgcgccgcggtggctaccgccagcagcagtctcagacggcctactgagctctccactctgtttcccgcctgggccatccaaccttgaagtcctaaaccacacctcagtcactaaaggtctgtttaaagttgttctggttgattgcttgttgccacaaaggtgtgttgagcccattcatttgctgattatatttctgagctgctaccacatgacagacacaaggctcagatgaagaggtgaattgaacacgttcctgacctcaaaaaaaa

SEQ ID NO: 219 - protein, 913 aa, Homo sapiens
MSRFFTTGSDSESESSLSGEELVTKPVGGNYGKQPLLLSEDEEDTKRVVRSAKDKRFEELTNLIRTIRNAMKIRDVTKCLEEFELLGKAYGKAKSIVDKEGVPRFYIRILADLEDYLNELWEDKEGKKKMNKNNAKALSTLRQKIRKYNRDFESHITSYKQNPEQSADEDAEKNEEDSEGSSDEDEDEDGVSAATFLKKKSEAPSGESRKFLKKMDDEDEDSEDSEDDEDWDTGSTSSDSDSEEEEGKQTALASRFLKKAPTTDEDKKAAEKKREDKAKKKHDRKSKRLDEEEEDNEGGEWERVRGGVPLVKEKPKMFAKGTEITHAVVIKKLNEILQARGKKGTDRAAQIELLQLLVQIAAENNLGEGVIVKIKFNIIASLYDYNPNLATYMKPEMWGKCLDCINELMDILFANPNIFVGENILEESENLHNADQPLRVRGCILTLVERMDEEFTKIMQNTDPHSQEYVEHLKDEAQVCAIIERVQRYLEEKGTTEEVCRIYLLRILHTYYKFDYKAHQRQLTPPEGSSKSEQDQAENEGEDSAVLMERLCKYIYAKDRTDRIRTCAILCHIYHHALHSRWYQARDLMLMSHLQDNIQHADPPVQILYNRTMVQLGICAFRQGLTKDAHNALLDIQSSGRAKELLGQGLLLRSLQERNQEQEKVERRRQVPFHLHINLELLECVYLVSAMLLEIPYMAAHESDARRRMISKQFHHQLRVGERQPLLGPPESMREHVVAASKAMKMGDWKTCHSFIINEKMNGKVWDLFPEADKVRTMLVRKIQEESLRTYLFTYSSVYDSISMETLSDMFELDLPTVHSIISKMIINEELMASLDQPTQTVVMHRTEPTAQQNLALQLAEKLGSLVENNERVFDHKQGTYGGYFRDQKDGYRKNEGYMRRGGYRQQQSQTAY

SEQ ID NO: 220 - DNA, 107 bp, Homo sapiens
acgtggacctggatcccactgatggcaagctcttccccagcgatggttttcgtgactgcaagaagggggatcccaagcacgggaagcggaaacgaggccggccccga

SEQ ID NO: 221 - DNA, 3218 bp, Homo sapiens
aggctctatttagagccgggtaggggagcgcagcggccagatacctcagcgctacctggcggaactggatttctctcccgcctgccggcctgcctgccacagccggactccgccactccggtaggattccccgcctgtcattccctagcccagctcttgggaaactgcagaggggtccagaggatttgcagttctgaacctgcacactccagtctaggatctccgagcaagagcgtagcctcatggctgcaacctgtgagattagcaacatttttagcaactacttcagtgcgatgtacagctcggaggactccaccctggcctctgttccccctgctgccacctttggggccgatgacttggtactgaccctgagcaacccccagatgtcattggagggtacagagaaggccagctggttgggggaacagccccagttctggtcgaagacgcaggttctggactggatcagctaccaagtggagaagaacaagtacgacgcaagcgccattgacttctcacgatgtgacatggatggcgccaccctctgcaattgtgcccttgaggagctgcgtctggtctttgggcctctgggggaccaactccatgcccagctgcgagacctcacttccagctcttctgatgagctcagttggatcattgagctgctggagaaggatggcatggccttccaggaggccctagacccagggccctttgaccagggcagcccctttgcccaggagctgctggacgacggtcagcaagccagcccctaccaccccggcagctgtggcgcaggagccccctcccctggcagctctgacgtctccaccgcagggactggtgcttctcggagctcccactcctcagactccggtggaagtgacgtggacctggatcccactgatggcaagctcttccccagcgatggttttcgtgactgcaagaagggggatcccaagcacgggaagcggaaacgaggccggccccgaaagctgagcaaagagtactgggactgtctcgagggcaagaagagcaagcacgcgcccagaggcacccacctgtgggagttcatccgggacatcctcatccacccggagctcaacgagggcctcatgaagtgggagaatcggcatgaaggcgtcttcaagttcctgcgctccgaggctgtggcccaactatggggccaaaagaaaaagaacagcaacatgacctacgagaagctgagccgggccatgaggtactactacaaacgggagatcctggaacgggtggatggccggcgactcgtctacaagtttggcaaaaactcaagcggctggaaggaggaagaggttctccagagtcggaactgagggttggaactatacccgggaccaaactcacggaccactcgaggcctgcaaaccttcctgggaggacaggcaggccagatggcccctccactggggaatgctcccagctgtgctgtggagagaagctgatgttttggtgtattgtcagccatcgtcctgggactcggagactatggcctcgcctccccaccctcctcttggaattacaagccctggggtttgaagctgactttatagctgcaagtgtatctccttttatctggtgcctcctcaaacccagtctcagacactaaatgcagacaacaccttcctcctgcagacacctggactgagccaaggaggcctggggaggccctaggggagcaccgtgatggagaggacagagcaggggctccagcaccttctttctggactggcgttcacctccctgctcagtgcttgggctccacgggcaggggtcagagcactccctaatttatgtgctatataaatatgtcagatgtacatagagatctattttttctaaaacattcccctccccactcctctcccacagagtgctggactgttccaggccctccagtgggctgatgctgggacccttaggatggggctcccagctcctttctcctgtgaatggaggcagagacctccaataaagtgccttctgggctttttctaacctttgtcttagctacctgtgtactgaaatttgggcctttggatcgaatatggtcaagaggttggaggggaggaaaatgaaggtctaccaggctgagggtgagggcaaaggctgacgaagaggggagttacagatttcctgtagcaggtgtgggcttacagacacatggactgggctgggaggcgagcaaaggaagcagctgagactgttggagaacgcttacaagacttcatgcaagcaaggacatgaactcagaacactgaggtcagaagcatcctgctgtcatgacaccgctcgagtgaccttgaccttgaccaagtctgtcctgtttaggactgatttttcctattaggctagggtttggacctgatgttctcaagatgtctagaattgcatggctggccttgtggaatagatggttttgcattccagccaagtgtgctgtaaactgtatatctgtaatatgaatcccagcttttgagtctgacaaaatcagagttaggatcttgtaaaggaaaaaaaaaaaaaaacaaaacaaaatggagatgagtacttgctgagaaagaatgagggaaggagttggcatttgttgaaagtgtagtctttttctcttttttttttaattgcaacttttactttagatttaggaggtcgtgcgcaggtttgttacatgggtatattgtgtgatgctgagcttgggatgcgaatgatcctgtcacccaggtagtgagtatagcacccagtgaaactgtagtctcatgccaggcactgtgctagcccactctggctcatttaatcctctcctaagaagagaggagacacagcgtccccatttgacagatgcagaaagaggttccacaggtgtgccttgattctgtcctaaaaccgtttcccggaagcttttcctggtgtgggcgcttctaacctaatcctcaatcgattccagaactattactctgtttccacagtgatactgtgtctaggttttagggaggacagttcattgatgttacttaagaatgctttccaggtggaaagttccttaagtttgaggcttcaaattccatacagcacattaaaatcccattcatgagtttgaaatactgctctgttgtcttggaaataccaatcagattgttggctgaagtgatgtggataaagaagggatcttagaaaaa

SEQ ID NO: 222 - protein, 371 aa, Homo sapiens
MAATCEISNIFSNYFSAMYSSEDSTLASVPPAATFGADDLVLTLSNPQMSLEGTEKASWLGEQPQFWSKTQVLDWISYQVEKNKYDASAIDFSRCDMDGATLCNCALEELRLVFGPLGDQLHAQLRDLTSSSSDELSWIIELLEKDGMAFQEALDPGPFDQGSPFAQELLDDGQQASPYHPGSCGAGAPSPGSSDVSTAGTGASRSSHSSDSGGSDVDLDPTDGKLFPSDGFRDCKKGDPKHGKRKRGRPRKLSKEYWDCLEGKKSKHAPRGTHLWEFIRDILIHPELNEGLMKWENRHEGVFKFLRSEAVAQLWGQKKKNSNMTYEKLSRAMRYYYKREILERVDGRRLVYKFGKNSSGWKEEEVLQSRN

SEQ ID NO: 223 - DNA, 106 bp, Homo sapiens
gatcctgacatgagacgggaaatggagcagtcaatgaatatgctgaattccaaccatgagttgcctgatgtttctgagttcatgacaagactcttctcttcaaaat

SEQ ID NO: 224 - DNA, 1069 bp, Homo sapiens
ggtctgagtgcagagctgctgtcatggcggccgctctgtggggcttctttcccgtcctgctgctgctgctgctatcgggggatgtccagagctcggaggtgcccggggctgctgctgagggatcgggagggagtggggtcggcataggagatcgcttcaagattgaggggcgtgcagttgttccaggggtgaagcctcaggactggatctcggcggcccgagtgctggtagacggagaagagcacgtcggtttccttaagacagatgggagttttgtggttcatgatataccttctggatcttatgtagtggaagttgtatctccagcttacagatttgatcccgttcgagtggatatcacttcgaaaggaaaaatgagagcaagatatgtgaattacatcaaaacatcagaggttgtcagactgccctatcctctccaaatgaaatcttcaggtccaccttcttactttattaaaagggaatcgtggggctggacagactttctaatgaacccaatggttatgatgatggttcttcctttattgatatttgtgcttctgcctaaagtggtcaacacaagtgatcctgacatgagacgggaaatggagcagtcaatgaatatgctgaattccaaccatgagttgcctgatgtttctgagttcatgacaagactcttctcttcaaaatcatctggcaaatctagcagcggcagcagtaaaacaggcaaaagtggggctggcaaaaggaggtagtcaggccgtccagagctggcatttgcacaaacacggcaacactgggtggcatccaagtcttggaaaaccgtgtgaagcaactactataaacttgagtcatcccgacgttgatctcttacaactgtgtatgttaactttttagcacatgttttgtacttggtacacgagaaaacccagctttcatcttttgtctgtatgaggtcaatattgatgtcactgaattaattacagtgtcctatagaaaatgccattaataaattatatgaactactatacattatgtatattaattaaaacatcttaatccagaaatcaaa

SEQ ID NO: 225 - protein, 242 aa, Homo sapiens
MAAALWGFFPVLLLLLLSGDVQSSEVPGAAAEGSGGSGVGIGDRFKIEGRAVVPGVKPQDWISAARVLVDGEEHVGFLKTDGSFVVHDIPSGSYVVEVVSPAYRFDPVRVDITSKGKMRARYVNYIKTSEVVRLPYPLQMKSSGPPSYFIKRESWGWTDFLMNPMVMMMVLPLLIFVLLPKVVNTSDPDMRREMEQSMNMLNSNHELPDVSEFMTRLFSSKSSGKSSSGSSKTGKSGAGKRR

SEQ ID NO: 226 - DNA, 108 bp, Homo sapiens
tgcatatggcactcagcctgcttatccagcctatgggcagcagccagcagccactgcacctacaagaccgcaggatggaaacaagcccactgagactagtcaacctca

SEQ ID NO: 227 - DNA, 2415 bp, Homo sapiens
gcagtgcggcgcctagagggaaagcgagagggagacggacgttgagagaacgaggaggaaggagagaaaatggcgtccacggattacagtacctatagccaagctgcagcgcagcagggctacagtgcttacaccgcccagcccactcaaggatatgcacagaccacccaggcatatgggcaacaaagctatggaacctatggacagcccactgatgtcagctatacccaggctcagaccactgcaacctatgggcagaccgcctatgcaacttcttatggacagcctcccactgtagaagggaccagtacaggttatactactccaactgccccccaggcatacagccagcctgtccaggggtatggcactggtgcttatgataccaccactgctacagtcaccaccacccaggcctcctatgcagctcagtctgcatatggcactcagcctgcttatccagcctatgggcagcagccagcagccactgcacctacaagaccgcaggatggaaacaagcccactgagactagtcaacctcaatctagcacagggggttacaaccagcccagcctaggatatggacagagtaactacagttatccccaggtacctgggagctaccccatgcagccagtcactgcacctccatcctaccctcctaccagctattcctctacacagccgactagttatgatcagagcagttactctcagcagaacacctatgggcaaccgagcagctatggacagcagagtagctatggtcaacaaagcagctatgggcagcagcctcccactagttacccaccccaaactggatcctacagccaagctccaagtcaatatagccaacagagcagcagctacgggcagcagagttcattccgacaggaccaccccagtagcatgggtgtttatgggcaggagtctggaggattttccggaccaggagagaaccggagcatgagtggccctgataaccggggcaggggaagagggggatttgatcgtggaggcatgagcagaggtgggcggggaggaggacgcggtggaatgggcgctggagagcgaggtggcttcaataagcctggtggacccatggatgaaggaccagatcttgatctaggcccacctgtagatccagatgaagactctgacaacagtgcaatttatgtacaaggattaaatgacagtgtgactctagatgatctggcagacttctttaagcagtgtggggttgttaagatgaacaagagaactgggcaacccatgatccacatctacctggacaaggaaacaggaaagcccaaaggcgatgccacagtgtcctatgaagacccacccactgccaaggctgccgtggaatggtttgatgggaaagattttcaagggagcaaacttaaagtctcccttgctcggaagaagcctccaatgaacagtatgcggggtggtctgccaccccgtgagggcagaggcatgccaccaccactccgtggaggtccaggaggcccaggaggtcctgggggacccatgggtcgcatgggaggccgtggaggagatagaggaggcttccctccaagaggaccccggggttcccgagggaacccctctggaggaggaaacgtccagcaccgagctggagactggcagtgtcccaatccgggttgtggaaaccagaacttcgcctggagaacagagtgcaaccagtgtaaggccccaaagcctgaaggcttcctcccgccaccctttccgcccccgggtggtgatcgtggcagaggtggccctggtggcatgcggggaggaagaggtggcctcatggatcgtggtggtcccggtggaatgttcagaggtggccgtggtggagacagaggtggcttccgtggtggccggggcatggaccgaggtggctttggtggaggaagacgaggtggccctggggggccccctggacctttgatggaacagatgggaggaagaagaggaggacgtggaggacctggaaaaatggataaaggcgagcaccgtcaggagcgcagagatcggccctactagatgcagagaccccgcagagctgcattgactaccagatttattttttaaaccagaaaatgttttaaatttataattccatatttataatgttggccacaacattatgattattccttgtctgtactttagtatttttcaccatttgtgaagaaacattaaaacaagttaaatggtagtgtgcggagtttttttttcttccttcttttaaaaatggttgtttaagactttaacaatgggaaccccttgtgagcatgctcagtatcattgtggagaaccaagagggcctcttaactgtaacaatgttcatggttgtgatgttttttttttttttttaaataaaattccaaatgtttataaaga

SEQ ID NO: 228 - protein, 661 aa, Homo sapiens
MASTDYSTYSQAAAQQGYSAYTAQPTQGYAQTTQAYGQQSYGTYGQPTDVSYTQAQTTATYGQTAYATSYGQPPTVEGTSTGYTTPTAPQAYSQPVQGYGTGAYDTTTATVTTTQASYAAQSAYGTQPAYPAYGQQPAATAPTRPQDGNKPTETSQPQSSTGGYNQPSLGYGQSNYSYPQVPGSYPMQPVTAPPSYPPTSYSSTQPTSYDQSSYSQQNTYGQPSSYGQQSSYGQQSSYGQQPPTSYPPQTGSYSQAPSQYSQQSSSYGQQSSFRQDHPSSMGVYGQESGGFSGPGENRSMSGPDNRGRGRGGFDRGGMSRGGRGGGRGGMGAGERGGFNKPGGPMDEGPDLDLGPPVDPDEDSDNSAIYVQGLNDSVTLDDLADFFKQCGVVKMNKRTGQPMIHIYLDKETGKPKGDATVSYEDPPTAKAAVEWFDGKDFQGSKLKVSLARKKPPMNSMRGGLPPREGRGMPPPLRGGPGGPGGPGGPMGRMGGRGGDRGGFPPRGPRGSRGNPSGGGNVQHRAGDWQCPNPGCGNQNFAWRTECNQCKAPKPEGFLPPPFPPPGGDRGRGGPGGMRGGRGGLMDRGGPGGMFRGGRGGDRGGFRGGRGMDRGGFGGGRRGGPGGPPGPLMEQMGGRRGGRGGPGKMDKGEHRQERRDRPY

SEQ ID NO: 229 - DNA, 108 bp, Homo sapiens
cagaaagtgacagcggagtctatgcctgcggagcgggcatgaacacagaccggggaaagacccagaaagtcaccctgaatgtccacagtgaatacgagccatcatggg

SEQ ID NO: 230 - DNA, 2962 bp, Homo sapiens
agattgtgaagggttcctgagtaagcagcgtgtctccatccccctctctaggggctcttggatggaccttgcactctagaagggacaatggacttctggctttggccactttacttcctgccagtatcgggggccctgaggatcctcccagaagtaaaggtagagggggagctgggcggatcagttaccatcaagtgcccacttcctgaaatgcatgtgaggatatatctgtgccgggagatggctggatctggaacatgtggtaccgtggtatccaccaccaacttcatcaaggcagaatacaagggccgagttactctgaagcaatacccacgcaagaatctgttcctagtggaggtaacacagctgacagaaagtgacagcggagtctatgcctgcggagcgggcatgaacacagaccggggaaagacccagaaagtcaccctgaatgtccacagtgaatacgagccatcatgggaagagcagccaatgcctgagactccaaaatggtttcatctgccctatttgttccagatgcctgcatatgccagttcttccaaattcgtaaccagagttaccacaccagctcaaaggggcaaggtccctccagttcaccactcctcccccaccacccaaatcacccaccgccctcgagtgtccagagcatcttcagtagcaggtgacaagccccgaaccttcctgccatccactacagcctcaaaaatctcagctctggaggggctgctcaagccccagacgcccagctacaaccaccacaccaggctgcacaggcagagagcactggactatggctcacagtctgggagggaaggccaaggatttcacatcctgatcccgaccatcctgggccttttcctgctggcacttctggggctggtggtgaaaagggccgttgaaaggaggaaagccctctccaggcgggcccgccgactggccgtgaggatgcgcgccctggagagctcccagaggccccgcgggtcgccgcgaccgcgctcccaaaacaacatctacagcgcctgcccgcggcgcgctcgtggagcggacgctgcaggcacaggggaggcccccgttcccggccccggagcgccgttgccccccgccccgctgcaggtgtctgaatctccctggctccatgccccatctctgaagaccagctgtgaatacgtgagcctctaccaccagcctgccgccatgatggaggacagtgattcagatgactacatcaatgttcctgcctgacaactccccagctatcccccaaccccaggctcggactgtggtgccaaggagtctcatctatctgctgatgtccaatacctgcttcatgtgttctcagagccctcatcacttcccatgccccatctcgactcccatccccatctatctgtgccctgagcatggctctgcccccaggtcgtcttgcacaccttggcagccccctgtagttgacaggtaagctgtaggcatgtagagcaattgtcccaatgccacttgcttcctttccaagccgtcgaacagactgtgggatttgcagagtgtttcttccatgtctttgaccacagggttgttgctgcccaggctctagatcacatggcatcaggctggggcagaggcatagctattgtctcgggcatccttcccagggttgggtcttacacaaatagaaggctcttgctctgagttatgtgacatgcctcagccccatggactaagcaggggtctggtataaaaacactcctggaaacgcctttgccctgatccaaatgttagcacttgctagtgaacgtctacttatctcaagttctatgctaaaggcaatttatcttgatgtgatgataaaccaaacttattagcaagatatgcatatatatccataaattctctttactctgtctccatcacttgatgcacataagtgccctgacctcagcatctcccctctaaaaaaaaaaaaaaaaaagtatctctttatctttcttccatagcctgacactgatatttgtgcacttaccttaactttggtctattttattcatccaaaaccattacatttcttggttttcacaaatgttccccatttcttagccagttccagacaatgtatagcaagcaggggaaggaaagcagtcaggagttcctgggtggccacggctctgcaatagcacttatgtcatggaagtgatatcccacctcctacatatactctttgcctaggtttttggaacaaggttatagtcagacactgtatctttagattgatgtcgaccacaaagttcagccagagcttgaggctagatgcacagccttgctattgggaagaaggccttttctagctgtacaacacagtctcactgggcattcatccagaaatagagaagaaagtctgccagacttgagttatgttgtcttttattagcagggaatgtcatcacagattggatagtacatccaggtgcaatgtcaccatcagcaaggtcagcttgacactcaagtggaagattagggaagaatgactaggataaaaaaaaaaggagggcaccaagggaaagggatgatggggtgagctggcgagtgtgggtgggaaatgaaatgtttattgaggatctgctttgtgctgggcactttaatccacattttatcgtttacttttcaaacagatgcaccttacccccaccccaatgctctgtccctgcagatatcagaagacagtgtgattttcatgctctgaagttcagttttacatccaagcatccctctctgttttttaacaatccaaagacaggccaaaaaaagcaccacagtttattaagtacttactaagcacccatccactgccccacactgtggcaaggattgtgaggggtaaagaagcatggggcacaatattctgctgccttcatgtaacttacagtctcacaaataaatagaacttcagttgaaa

SEQ ID NO: 231 - protein, 390 aa, Homo sapiens
MDFWLWPLYFLPVSGALRILPEVKVEGELGGSVTIKCPLPEMHVRIYLCREMAGSGTCGTVVSTTNFIKAEYKGRVTLKQYPRKNLFLVEVTQLTESDSGVYACGAGMNTDRGKTQKVTLNVHSEYEPSWEEQPMPETPKWFHLPYLFQMPAYASSSKFVTRVTTPAQRGKVPPVHHSSPTTQITHRPRVSRASSVAGDKPRTFLPSTTASKISALEGLLKPQTPSYNHHTRLHRQRALDYGSQSGREGQGFHILIPTILGLFLLALLGLVVKRAVERRKALSRRARRLAVRMRALESSQRPRGSPRPRSQNNIYSACPRRARGADAAGTGEAPVPGPGAPLPPAPLQVSESPWLHAPSLKTSCEYVSLYHQPAAMMEDSDSDDYINVPA

SEQ ID NO: 232 - DNA, 102 bp, Homo sapiens
aaaagaatggagaggaaatacacagaaagcaacgtgtatgaaaatgggctatgaagaggtttctcagaagttcacctccatacggcgagtccgtggtgataa

SEQ ID NO: 233 - DNA, 7969 bp, Homo sapiens
ggaaaccgccccggcggctgagaggctgcggccactgcctggcaccccgacgggaggggctccggatcgttcggagccggctgaaccccttcggccgcgagcgaccgcatgagtcgggggactatgccccagcccgaagcgtggccaggcgcgagctgcgccgagacgccggcgcgggaggcggcggccacggcgcgggacggcgggaaggcggcggccagcgggcagccgcggcccgagatgcagtgcccggccgagcatgaggaggacatgtaccgtgctgcagatgaaatagaaaaggagaaagaattgcttatacatgaaagaggggcatcagaaccgagattaagcgtagctcctgaaatggatatcatggactactgcaaaaaagaatggagaggaaatacacagaaagcaacgtgtatgaaaatgggctatgaagaggtttctcagaagttcacctccatacggcgagtccgtggtgataattactgtgcactgagggccacgctgttccaggccatgagccaggctgtggggctgccgccctggctgcaggacccggagctcatgctgttaccagaaaaactcataagcaaatacaactggatcaagcaatggaaacttggactgaaatttgatgggaagaatgaggacctggttgataaaattaaagagtcccttactctgctgaggaagaagtgggcaggcttggctgaaatgagaactgctgaagcaagacagatagcttgtgatgaactattcacaaatgaggcggaggaatatagcctctatgaagctgtaaaatttctaatgctaaacagagccattgaactatataatgataaagagaaaggaaaggaagtaccatttttctctgtgcttctgtttgctcgggacacatcaaatgacccaggacagcttctgaggaaccacctcaaccaggtgggacacactggtggtcttgaacaggttgaaatgttccttcttgcctatgctgtgcgccacaccatccaggtgtaccggctctccaagtacaacacggaagaattcatcacagtctaccccaccgacccacccaaggactggccagtggtaacgctcattgctgaggacgatcggcactataacatccccgtcagagtgtgtgaggagaccagtctatgagagacgcatgctcctgacagcctggcgacgtggcgaagatgcacaggtggctcctgggcttgggctgcaggtttgggggtctctaagaacaatctctgagaagaacccttgggcccctgggagccaagttggacaggatgtcctgaagactagcttttgataagagaaattaaccaagtctttcccctcatctatgatgcaatatatttcagtgggggccttcagagcacacctgttggacggtgcaaaccatatcttctccagaaggcaaatacttttgtatcagaggaaactcagttttggagaggaatatgttctttatgtctcaaatcaaaactctctctaatggtaaactggcttctaatttttttaagtacagtatttttttttcccctttagtagtaacgggtttctatagatcttcctatacagtctgctttaactcaggaccttgagattatgagactgacgtgctgcccactgcactgagggggcttctaacagtctgctttaagtggtataattctgggatagatctgttactggcatagtcatgacaacctctggtaatcttaccttctcctttttatgaagggaagagcaatggtttggacttacatcttaattaaggctattttaagcagattgttttgcaacagattaagaattgggtcccaaagtgggttatttcaaggcatttttgaagactggaggagcgtaggagggagtggtgagggaacctagaacttcttgctccttgtgactatgacagatgtctgatgcccccagcgcactggagtctggggcttggtgcaggtggtgccccatcagtgtggacagacactacttgcctttgtggtttagtgttggaagctttaattattctacagttccatagattcacaattttatagccaaacagtttgtatccacctgctttcagaggaggaaccaaaggccaaattactttgaggtagggcttagctggacctgggttttcctatgctcttttcatgctgtgttggagggtgtgtccactgccagatctgtgtaacccgtctgggtcaggggatgagtgacagcaaaccatcttaaaatttttcatgagtacatttaagcggaagcatacgggaatatgagtgcaaaagtgtggctgagccgcgtatgcccttgattggttttgggaagcctgagggaggcagccttcctggctatgagccatcgcctgcccaatcaggctaagggtggtgactggggtggtgaaggggcagctctgctgagcatggtctgccttatggcctgaattgtcctcaaggggtgtggactgcagatggtgttcacatgaaccggagacatcactctttaggattctactggcagcccctgaattggctcaacgtttgtggaggtggtatttccctgaagtactgagctttgttttataataattaaaatccttatttggtccaatttaatatagtttagaagctattttttttgaggcaaaccgtttttgaaaatgtaaattttgtttttaattaaaaataaagtcttagttaagaaaactcaggatgcacaaaactattcagactgttactttagctttctcccattacctcatcagtaatattcaccacattttgctaaatatttattgattagagtgttgaaatcaaattctgctctaaatgtgtgtgaatatgttggagaggctttgtgttcttcactgtgaaatgcaattgtgccttgaataagaaggtacctagaagccaaattaaagtaataatgacttcttattggctttgatttttcattgcagtatatgggattgtacagcaggaaatgcttatcattaatttctgatgttttttaaagcacaactcgaaacatttcgatcatacatacatagcagtagagatctgtgcccttcaggtacattgaatctgaccatcagtttatatatgtcattgaattttaagaatactcatgttaataatagtcatctatccttgcattttgaaactgttctaatcttagtgaacttgaattggatttctgggtaaaagaatgtgtttcttttatgttgcttatgtccgaaggccttgtcagaatctgtcagactcttgtttaggtttagtgtgatcatggcgtcagagaagcaaagctttcaaataaatagtacttcaggaaatagaaatgattgaccaactttaaaaataatttttttttaattgcaatatgcagcttcagttgcccagaatcttagttccgtttctcattcttggtcttgagctggtcaggtgacatcagcagattagaagttgaatggagattaagtggattcaggaggatgttccacttagagcagtcttcaaaatgataaggtgttctagaagaaaggaatgtagtaggaactatactatgcctaactttctatcccagagtgtcttgcaagagtttaggagttttggaccctgtgtattggcagaaaagttatctccatcttaagcaggcatgacttttatacctgtgagctcatttaaggtgcatttaaacctaaaataatttccctgtattatgcttcatgggattaacactgcttttccagaacattttcagattcccctccttacatcctgagctccttctgtatatacatctgttgattttatccatccacaaggaacaatgatagtcacattagagaacaagaaaccagtaatacatggtctctaactgatgattcgggcctggatttgattgaaagtgtttgcagttcctcttccgtagaatacagagtggatgaaaatgttttcaatgcacagaacaggatgaatccttttttctttatttagcgatttacacttttgttactctattatatattcagttagtgtctgataagattttctttgcttaaggagaacggacattgccttggtatgtttttttttttttttccctccacttttggagcttatcaggtaaaaatctcaagccacatgaattgttaacacctctgttgggaaaagcctttgtgagtttttatgtacttggtctttgtttttgttattcatcctgtgtcctccctcttcccgatgtgctgttttacctaggagttagtctgctttctgaggatcttttagagagaggctgtgaagtgctgaatcacctttaatgatacagcacttctgccatctcagcatctacataggacttacatagacttcctgaatgtgtcttcttcagatactaaagtacagttggatcattttcttatctccttttcttaagcagtactttgcaggtactcccctttgaaagccagaagcataaaccattggggaatcttaacttgtagacatgcagtaaaagaaatgcatttatgtaagatctgtgagtacttaaaaagaaagccctcagtgtgtgtgaagtgaatgtgaaatgtgtgtgaaatacatagaattcccaaatagtttagcaaaggcagggcgcaatatcaagtaatttaaaaatggtccaaggaactgtaagaaggaggaactaattctagaataaatgttaaaatgccattcaagaacaaaaccacagatgccatacagacctcctgtgcttaagttatagaagaataaaaatctgaatgaatggaaggccttacgtgtatacagtttacaaattcctatttctaaaatttaagtcccttatttaacagaagtatgtattttaatgcttaactgtctcgggaaacctcatttgtgacatcatctaaggggatgggaagactagggagccagtgccacgttgaacagaacagtggtttagtgaatgtgtgaggaaagacatgggcaactgattattaatgtttttgtaattcagtttataacttggaaccaatgaaaagcaacaaaactaaactggtttgacagcctgccacttctggcatttcctgtaagtcactagcagtaggtgtgaggtgggcttgcccatgaccaggaggggtgtgtgtgtgtgtgtgcatgtgtgtatatgcgtgttggtctgcagtcacagcatacctttatgtgcatgtgtcctcgcagcttgggactcagcagtattctgggagggtggaggtgaactgtcccatgtattgtattatatattttttgagatggggtcttgctctgttgcccaggctggagtgcagtggtgcgatctcagctcactgcaacttttgcctcctggttcaagcagttctcctgcctcagcctgccaaatagctgggattacaggtgtgtaccaccactcccagctaatttttgtatttttagtagagatggggttttaccatgttggccaggctggtctcgagctcctggcctcaggtgatccacctgctttggcctcccaaagtgctgagattacaggcgtgaactaccgcgcctggccccatgtattgtatttttttcaggttatattgaaatctactaccaggaatgtcggaatgggttttggtatgtataatggaaatagatagagtggttaagtctagaaacacatacattaattgtattgaaatgttatatcaatacatcatttatgatgtgtgtgtggtcccagacctcatggccaccagtttgtttaagcattgtgaatgctttttaatagcattcattagcattaatggaggaggacactgtgttttctcaattaatctcattgatttgtttggtataagtttgggtcagaaatgaaactgccaaaacatcgatcagtacaaggaagggacacagggcttaaaatgtccacagtcttggcagtggacttggcagttctcccagtaagcagaagtacttgagcttaattctgaacttcaaagtaatattttatacttaattttaggagttttcatttacatattgaaaaatgccttgactgtattcacataaatggtgctaaaacattgtaccccttataagaactgcagcaatccacagtaatgttggttacttctgagtatttgataaaggaacaaagtcaaaatgaatgtatttaataagcttctttctcatttccattgtttttataaaaatattttggtattgttgcctgcattttagccacttctaactttttgtattatgaatttggagaggataacaagccaactttagaccctctgccagtggcgatggtgtttttcttccatgggtaagccattgtgaatggaggctggtggagcagcacactgtgtgaacctggcagcgctcatcttggcttgtttagcagtgcctctgtttacaccataagatgttccgcatgtgtccaaaatttcgcctgctctgaaaaacatgcccccgaggctctgtgcagtttggggccttggttcccacctgcagatgcggtcagttgcctggctcctggggccagagtttcctctgttacttgttgagtctcttgtcttcactgtcagaagctgaactgacttgggggctttgctgttgatccactttagcaaaccctgctgcagaggactgtaaaaacaaataactaaaaataaacttagaaaatacaactcagaagcctggctctgttgctgtggtcaaatgcttgcctttgaggactttggcagattgtgctattacattgggctctaactttctggcacccgcaaggcagacctatgatgtccacatggctgactcttgacccctggccattgtgagcagaggaatcaagggtttagggaggcagtattgggcagtgtggaagagttagatgagatgaagcagttagcacagtgcttaacccatactaagtgcccccaaccctgccagccaaattaggtgcatagttttcagcttgggtctggattcaacagcattcccgctgcccactaaaagggtgggcttggacagttcctgaacctccctaaatctgtttcttcatctttaccacacacagtctgtctcagtggtggtgtggattaagtgaggtgctagcacttattaggggaagatcctccagacctgcaaagcagggctgcagccccaattctgacccagccctgctgtgtgtttgccgcaaagaggtttggtgtgtgcgagacatttctttatgaaccatttacactgctggaaatgtacccactaatgtgatggcaagaacttcaacaaattgcttatgaatcaggctctcaatggaagaagttaatcctctgaagagggggaagactggactttcagaagtatgttggggatagagaatgaagtttgagtcagcagagctctgccttcctgtttgtcaaagaactagagtctgggagtcttgcaagatggagctgggcttctgaagaacccagtgggtaggtactgggcatccattagacggcagtgctaagtcggtcatgtgcagcagaaagacctccccactgtgaacaacaaaccactttcctcctccagtggcccattcatttggattgatacactttttcagtgtcagaaatgcactttctccctctacttgtctgaattacgatgctctgctcaactctgtggacagtgtttcttgaatttccttttccaccgccttttcccactcaagaaagtggagagaaaaacagggatgcaggctgtgggtcttgtggaagccctttacaaccattaaataaagaacaccagctgcattatgtgtgtttagaacgagaagttgtttgtacagtatttttctattgaccgcttccgtcttgcctgaaacctgggcattctttctgtagtttctctgaattttctgtctcacctcctcacccctacccttgcctttt

SEQ ID NO: 234 - protein, 352 aa, Homo sapiens
MSRGTMPQPEAWPGASCAETPAREAAATARDGGKAAASGQPRPEMQCPAEHEEDMYRAADEIEKEKELLIHERGASEPRLSVAPEMDIMDYCKKEWRGNTQKATCMKMGYEEVSQKFTSIRRVRGDNYCALRATLFQAMSQAVGLPPWLQDPELMLLPEKLISKYNWIKQWKLGLKFDGKNEDLVDKIKESLTLLRKKWAGLAEMRTAEARQIACDELFTNEAEEYSLYEAVKFLMLNRAIELYNDKEKGKEVPFFSVLLFARDTSNDPGQLLRNHLNQVGHTGGLEQVEMFLLAYAVRHTIQVYRLSKYNTEEFITVYPTDPPKDWPVVTLIAEDDRHYNIPVRVCEETSL

SEQ ID NO: 235 - DNA, 104 bp, Homo sapiens
ggcaagaacaagaaaaataagaagaagaaaggagacagagtcaacaattcaattgatgatgtctttctacctaaagatattgacctagacagtgtggatatgga

SEQ ID NO: 236 - DNA, 5522 bp, Homo sapiens
atccctttccccttgtgtccgccatattggactctaactctggtcagccgcggcgccgggactgtggactcgcggttcctcccgcccagcggcctgccccgcagctcccgcccgccccagccctccccgacccggacgcgaccccgcgcagcgccccccggctggccggagcgcccgccgccgcggccgcctcagcctccccgccttccccgccctccgccgccgcccgcggcccccgcgcccgctctgcgcccctctccccgcccgccatgagcccagccgacgccaagcgcggggccaagcgccggaagaacaagcggggcggcggcggcggctcgggcgggggtaacggcggcgcgagcagcggcaaggccggcccggcggcggcgctgcgcggttcccaggccgcgggcctggcggccccgggcagcgcggcaggcctggtgggcggcgcggcggcggccaacgggcctctcggcgcgggcgcgagcgcgggcggcgccgcccccggaggctacttcgagactccttttagttttggcatgaatcataggacaccaccctaccctgctggggattattgtcttctgtgcagaagtgaacggaaagactcatcattcttagagagtggaattaagactgcgagcaaattggccctttccatggctcccaagggcaacagcgtgctgcacctgccactgtgggtgtgcccggactgccgcaggaccgtggagaaggaggagaggcatggcggccttgaccagccagtgagccaagattttcttcttcactcctcgcttggtggctcccagccagaggccggcagtggtgggaggctcgctctgggtgcacagacgctgccttcagacaccgcatgctcgtgcgaggcctgcagtgagcgcagagaaatttcggcagaggcggaccgggaacctcagcagctgcagaactactggtcagaagtgcgctacacggtgcgctgcatctaccgccaggcaggaaccccgctggcagatgaccaggaccagtctctggtgcctgacaaggagggagtgaaggagctcgtggataggctctgcgagagggacccctaccagctgtaccagcgtctggaacagcaagctcgagagtatgtgctggagatgaaggtccgcctgctccggcagctgtcggctgcggccaaggtgaaggcaccatctggcctgcagggcccgccgcaagcgcaccagttcatctccctcctgcttgaggagtacggcgccctctgccaggccgcacgctccatcagcaccttccttggcactctggaaaatgaacacttgaaaaagttccaagtgacgtgggaactgcataataaacacctgtttgaaaatctggtcttttcggagccacttcttcagagcaacttgcccgcactggtgtcacagatcaggctaggaaccaccacacacgacacctgcagtgaggacacatacagtaccttgctgcagaggtaccagcgttccgaggaggagctgcgcagagtcgccgaggagtggctggagtgccagaagaggatcgacgcctatgtcgacgagcagatgacaatgaaaaccaagcagcgcatgttaacagaagactgggagctttttaaacaaagaagattcattgaagaacagttaaccaataagaaagcagttactggcgagaacaacttcacagacaccatgaggcacatgttatcgtcccggctgagcatgcccgactgccccaactgcaactacaggagaagatgtgcttgcgatgactgcagtctctcacacatcctcacgtgtggtatcatggacccccccgtcactgatgacatccacattcaccagctcccacttcaagtggatcctgctcctgactatcttgctgagaggagcccgcccagtgtgtcatctgcaagctcggggtccggctccagctctcccatcacaattcagcagcaccccaggctcatcctcacagacagtggctcggcaccaactttttgtagtgatgatgaagatgttgcaccattgtcagccaaatttgctgatatttatccattgagtaattatgatgataccgaggtggtggccaacatgaatggaatccacagcgaattgaatggtggcggggaaaacatggccctgaaggatgagtctcctcagataagcagtaccagcagtagttcctcagaagctgatgatgaagaagcggacggcgagagtagtggggagcccccaggggccccgaaggaagatggagtgctgggaagcaggagccccaggacagaggagagcaaagcagacagtccacccccatcctacccaacacagcaggctgaacaagctccaaacacttgtgaatgtcatgtttgtaagcaggaagcttctggactgacaccatctgcaatgacagccggagcccttcctcctggccatcagttcttgagcccagagaagcccacacaccctgcactgcacctttaccctcacatccatggacatgtgcctttgcacactgttccacacctgccacgccctctcatccaccccaccttgtatgcaacgccccccttcacacacagtaaggctttaccgccagcacctgttcagaatcacacaaataagcatcaggtattcaatgcatctcttcaagaccatatttatccgagctgttttgggaatactccagagtggaatagttctaaatttataagtctttggggatcagaagtgatgaatgataagaactggaatcctggcactttcttgccagatacaatttctgggagtgaaatattagggccaacactctcagaaacaagaccggaagcccttccacctccatctagcaatgaaacacctgcagtctcggatagtaaagagaaaaagaatgctgcaaaaaagaaatgtttatacaatttccaagatgctttcatggaagcaaataaagttgtcatggccacgtcatcagccacgtcctctgtgtcctgcacagctaccacagtgcagtccagcaacagccagttcagagtgtcatccaagagacctccttcagtaggtgacgtgtttcatggcatcagcaaggaggaccacagacactcggccccagccgccccgaggaatagccccacgggcttggcccccctcccagcgctctcgcctgctgcgctgtcacctgctgcgctctcacctgcctccacacctcaccttgcaaatcttgcagccccatcattccccaaaacagcaaccacaactcctgggtttgtggacacacgcaagagtttctgtcctgcacccctacccccggccacagatggctccattagcgcccctccaagtgtctgcagtgaccctgactgcgaagggcaccgctgcgagaatggtgtctacgacccacagcaggatgatggggacgagagtgcagatgaggacagctgctctgagcacagctccagcacctcgacctccaccaaccagaaggagggcaagtactgcgactgctgctactgcgaattctttgggcacggcgggcctccagctgcaccaacaagtagaaattatgcagaaatgagggaaaagcttcgcttacggctgaccaagaggaaagaggagcaacctaaaaaaatggaccagatctcagaaagggaaagcgtcgttgaccatcggagggtggaggatttgttgcagtttataaatagctccgaaaccaaaccagtgagcagcacgcgtgcagcgaagcgagcaaggcataagcaaaggaagctggaggagaaagctcgcctagaagcagaggccagggcccgggagcacctgcacctccaggaggagcagaggcggcgggaggaggaggaggatgaggaagaagaggaggatcgtttcaaggaggaatttcagcggcttcaggagcttcagaagctaagagctgtaaaaaagaagaagaaggagaggccaagtaaagactgccccaagttggacatgctcactagaaatttccaggcagcaacagagtctgttcctaactctggaaacatccacaatggctcactagagcaaactgaagaaccagaaacctcttctcactccccatccaggcatatgaaccactcagagcccaggccagggctaggggctgatggggatgctgcagaccccgtcgacaccagagactccaaatttctcctccccaaggaggtgaatgggaagcagcatgagccactctcttttttcttcgacatcatgcagcaccataaagaaggaaatggcaagcagaagctgaggcagaccagcaaggccagcagcgagccagcgaggaggcccacagagccccccaaggccacagaggggcagtccaagccccgggcccagactgagtcaaaggctaaggtggtcgacctcatgtccatcacagagcagaaaagagaggagagaaaagtcaacagtaataacaataacaaaaagcagctgaaccacatcaaggacgaaaagtcaaacccaacccctatggagcccacctctcccggtgagcatcagcagaacagcaagctggtgctggcagagtcccctcagccaaagggcaagaacaagaaaaataagaagaagaaaggagacagagtcaacaattcaattgatgatgtctttctacctaaagatattgacctagacagtgtggatatggatgagacagagagggaagtggaatatttcaaaaggttctgcttggattctgctagacagacccgacaaagactgtctatcaactggtccaattttagcttgaaaaaagccacctttgctgcccactgaatgaggactccctggagagggacacgcgagaggcaggccaggctgcaccaccccaagagccacgcccctcgctggcgccccagagccgtggtgcttgccaagggctgtgcggagctggtgctgcctgaaaccccagaccgagaagttgatgctcggcccacgccgttagctcgtgtgcgtgtagtctgtgcgtgagactccttcgattgtagctctgtgctgtcggattggaacagtagttcccgccaagtcctcccaccaccgcggcctcggaggcctgggccgtggccagataggagtttgcatcatccacgtggctccgttgcctctgcattgcgccctgtcctgtcatgtgtcctcaccggggtatcggccgtcactcagctctcctgtgcccctgcgtctcaccctaggcgggctgggcggggcaggcctcctttgttctccacaatctactgtctccgagtgtacacgttgcgctgtttgtgtttgatccccctgacttgtagccagcttgtgtaagatcccttgcagaacgagaaagttaaaaacaagcccacccagtactcacaccatcaagtctgttatagagtgtacgactgtattaacacggaggcctgcctggctacttttttaacatattgttaagtaatattaaaatcatgtctttctttttgaaagatggaatacattagtacagcagga

SEQ ID NO: 237 - protein, 1515 aa, Homo sapiens
MSPADAKRGAKRRKNKRGGGGGSGGGNGGASSGKAGPAAALRGSQAAGLAAPGSAAGLVGGAAAANGPLGAGASAGGAAPGGYFETPFSFGMNHRTPPYPAGDYCLLCRSERKDSSFLESGIKTASKLALSMAPKGNSVLHLPLWVCPDCRRTVEKEERHGGLDQPVSQDFLLHSSLGGSQPEAGSGGRLALGAQTLPSDTACSCEACSERREISAEADREPQQLQNYWSEVRYTVRCIYRQAGTPLADDQDQSLVPDKEGVKELVDRLCERDPYQLYQRLEQQAREYVLEMKVRLLRQLSAAAKVKAPSGLQGPPQAHQFISLLLEEYGALCQAARSISTFLGTLENEHLKKFQVTWELHNKHLFENLVFSEPLLQSNLPALVSQIRLGTTTHDTCSEDTYSTLLQRYQRSEEELRRVAEEWLECQKRIDAYVDEQMTMKTKQRMLTEDWELFKQRRFIEEQLTNKKAVTGENNFTDTMRHMLSSRLSMPDCPNCNYRRRCACDDCSLSHILTCGIMDPPVTDDIHIHQLPLQVDPAPDYLAERSPPSVSSASSGSGSSSPITIQQHPRLILTDSGSAPTFCSDDEDVAPLSAKFADIYPLSNYDDTEVVANMNGIHSELNGGGENMALKDESPQISSTSSSSSEADDEEADGESSGEPPGAPKEDGVLGSRSPRTEESKADSPPPSYPTQQAEQAPNTCECHVCKQEASGLTPSAMTAGALPPGHQFLSPEKPTHPALHLYPHIHGHVPLHTVPHLPRPLIHPTLYATPPFTHSKALPPAPVQNHTNKHQVFNASLQDHIYPSCFGNTPEWNSSKFISLWGSEVMNDKNWNPGTFLPDTISGSEILGPTLSETRPEALPPPSSNETPAVSDSKEKKNAAKKKCLYNFQDAFMEANKVVMATSSATSSVSCTATTVQSSNSQFRVSSKRPPSVGDVFHGISKEDHRHSAPAAPRNSPTGLAPLPALSPAALSPAALSPASTPHLANLAAPSFPKTATTTPGFVDTRKSFCPAPLPPATDGSISAPPSVCSDPDCEGHRCENGVYDPQQDDGDESADEDSCSEHSSSTSTSTNQKEGKYCDCCYCEFFGHGGPPAAPTSRNYAEMREKLRLRLTKRKEEQPKKMDQISERESVVDHRRVEDLLQFINSSETKPVSSTRAAKRARHKQRKLEEKARLEAEARAREHLHLQEEQRRREEEEDEEEEEDRFKEEFQRLQELQKLRAVKKKKKERPSKDCPKLDMLTRNFQAATESVPNSGNIHNGSLEQTEEPETSSHSPSRHMNHSEPRPGLGADGDAADPVDTRDSKFLLPKEVNGKQHEPLSFFFDIMQHHKEGNGKQKLRQTSKASSEPARRPTEPPKATEGQSKPRAQTESKAKVVDLMSITEQKREERKVNSNNNNKKQLNHIKDEKSNPTPMEPTSPGEHQQNSKLVLAESPQPKGKNKKNKKKKGDRVNNSIDDVFLPKDIDLDSVDMDETEREVEYFKRFCLDSARQTRQRLSINWSNFSLKKATFAAH

SEQ ID NO: 238 - DNA, 88 bp, Homo sapiens
cgcaggtgttgggctggatcttgatagcagttgttatcatcattcttctgatttttacatctgtcacccgatgcctatctccagttag

SEQ ID NO: 239 - DNA, 1127 bp, Homo sapiens
gctgatttagcttatggaagaggaaccagaaatttgtccttgaataatgtttcccgacaacgaagaggcagaaggatctgggcctgtgcgcgacgccccgggggacgaggctcatggagaagtttcgggcggtgctggacctgcacgtcaagcaccacagcgccttgggctacggcctggtgaccctgctgacggcgggcggggagcgcatcttctccgccgtggcattccagtgcccgtgcagcgccgcctggaacctgccctacggcctggtcttcttgctggtgccggcgctcgcgctcttcctcctgggctacgtgctgagcgcacgcacgtggcgcctgctcaccggatgctgctccagcgcccgcgcgagttgcggatcggcgctgcgcggctccctggtgtgcacgcaaatcagcgcggccgccgcgctcgcgcccctcacctgggtggccgtggcgctgctcgggggcgccttttacgagtgcgcggccaccgggagcgcggccttcgcgcagcgcctgtgcctcggccgcaaccgcagctgcgccgcggagctgccgctggtgccgtgcaaccaggccaaggcgtcggacgtgcaggacctcctgaaggatctgaaggctcagtcgcaggtgttgggctggatcttgatagcagttgttatcatcattcttctgatttttacatctgtcacccgatgcctatctccagttagttttctgcagctgaaattctggaaaatctatttggaacaggagcagcagatccttaaaagtaaagccacagagcatgcaactgaattggcaaaagagaatattaaatgtttctttgagggctcgcatccaaaagaatataacactccaagcatgaaagagtggcagcaaatttcatcactgtatactttcaatccgaagggccagtactacagcatgttgcacaaatatgtcaacagaaaagagaagactcacagtatcaggtctactgaaggagatacggtgattcctgttcttggctttgtagattcatctggtataaacagcactcctgagttatgaccttttgaatgagtagaaaaaaaaattgttttgaattattgctttattaaaaaataaacattggta

SEQ ID NO: 240 - protein, 315 aa, Homo sapiens
MEKFRAVLDLHVKHHSALGYGLVTLLTAGGERIFSAVAFQCPCSAAWNLPYGLVFLLVPALALFLLGYVLSARTWRLLTGCCSSARASCGSALRGSLVCTQISAAAALAPLTWVAVALLGGAFYECAATGSAAFAQRLCLGRNRSCAAELPLVPCNQAKASDVQDLLKDLKAQSQVLGWILIAVVIIILLIFTSVTRCLSPVSFLQLKFWKIYLEQEQQILKSKATEHATELAKENIKCFFEGSHPKEYNTPSMKEWQQISSLYTFNPKGQYYSMLHKYVNRKEKTHSIRSTEGDTVIPVLGFVDSSGINSTPEL

SEQ ID NO: 241 - DNA, 109 bp, Homo sapiens
gctgccctcggaaggctcggtcacactctccgagcacagccatcatctcccacggtaccacaggcctggtcacatgggacgctgcccgctaccttgcagaatgggccat

SEQ ID NO: 242 - DNA, 2116 bp, Homo sapiens
cagagtttcgagcgccgcttcctagcggcgcgcacactgcgctccttcccctggcaggtgggcggcggggcgagcggagaggcctgcggggcttgcggaagtccaggggcagacgggatgggtctccctgctgaaacccccggcgctcctgccaccacgaggctgtccacacggagcttttggacgagctgtacgaggcgctggcagagaccctgatggccaaggagtccacccagggccactggagctatttgctgccctcggaaggctcggtcacactctccgagcacagccatcatctcccacggtaccacaggcctggtcacatgggacgctgcccgctaccttgcagaatgggccatcaagaacctggcagccttcactaacagacgtgctgtattgcccagaagccatcgtgtccctggtcggggtcctgcggaggctggctgcctgctgggagcaccagcgggctcctgaggtctacatggcctttaccgtccgcaacccagagacgtgccaggtgttcaccaccgagctaggctgggctgggatcagatgggaagcggaagctcatcatgaccagaaactgtttccctatggagagcacttggagatggcaatgctgaacctcacactgtaggactcatacacgactccaacgggattgttagaatcaaatcactctcgtgggaagaatttttatatgggaaagcggataaaactttcattggactggaatgtttggagaatgttaaattccaaatcaggaaccacaatctgccctctaataagacatcggctatctaagcatgtgggtgccccctttctgccagcagttctggttcttaagaaaatcaccataaatcagacatgaaaattctggctccaaaaatagcattttctttgtgcaaataaaaacgtgtgtatcaagtatgacgttcccccaacgtggacacactcggttcctcacaaagccaagcccgctgcagctgccacatccctggacacactcggttcctcacaaagccaagctcgctgcagctgccacatccctggacacattcggttcctcacaaagccaagcccgcggcagctgccacatccctggacacactcggttcctcacaaagccaagcccgctgcagctgccacatccctgggcttgtggtgcagcaggtgcttttctcaagacaggaatcaaagtgttaggaacatggcagaaaggtgacacctggagaccaaatgcaggatgaggagtactgcagaggtcacagggaagtcacagaacagtaatacgctagcagggacatggggcgtgaagaacagaagaagacaggaagcatttctgagactccaaagaagaaatcagggccaaccacagcttcccgggtcattcaccaggtggcaccactgccgtcatttcagcttctggccactgggaggcgctgcttgaaagggtttgccctgagactccaagaagaagctgcgggaaggacagcaggggccctggggttttagcctctggcccaggagttatgtgtccataaccaaagggagcacagtctgcacccagctctcatcccatcagagctgctgcgactcccgcaggttcttccggaactggtttagcttgccttcaggatcaggaaagtttgagaaaagcatctgcaaaatactgaagagcagagcttacctcattgcctgtccccaccccatcccaggtcaccacctggatgaccccagctccccgacccaacaacaacccctcccaagtccctagctccctcacttggacttgagacccttcacaccccagcagcgctccgcctccatcttgacatgctttctggaaacttccccgtatgtcccactttcccacacttggtgccctggagcaccttccggcctctacatgatgtacgttcccctgtgagcaccctcctctcggcctctggccaacacagtcccacccatctgtgggtaacaagggggtgttcttttcagccttgctaaactgtctgaatcaaggatcacaaactacagcctgcaggccaaatccagcccacagcctgtgtttgtaaataaagctttattggaacaaagccacaccccttaa

SEQ ID NO: 243 - skipped

SEQ ID NO: 244 - DNA, 102 bp, Homo sapiens
cagttgagactcagaacttggaaggcctgcatcatgatggccaattctgccataagccctgtcctccaggtgaaaggaaagctagggactgcacagtcaatg

SEQ ID NO: 245 - DNA, 3696 bp, Homo sapiens
ctcttctcccgcgggttggtggacccgctcagtacggagttggggaagctctttcacttcggaggattgctcaacaaccatgctgggcatctggaccctcctacctctggttcttacgtctgttgctagattatcgtccaaaagtgttaatgcccaagtgactgacatcaactccaagggattggaattgaggaagactgttactacagttgagactcagaacttggaaggcctgcatcatgatggccaattctgccataagccctgtcctccaggtgaaaggaaagctagggactgcacagtcaatggggatgaaccagactgcgtgccctgccaagaagggaaggagtacacagacaaagcccatttttcttccaaatgcagaagatgtagattgtgtgatgaaggacatggcttagaagtggaaataaactgcacccggacccagaataccaagtgcagatgtaaaccaaactttttttgtaactctactgtatgtgaacactgtgacccttgcaccaaatgtgaacatggaatcatcaaggaatgcacactcaccagcaacaccaagtgcaaagaggaaggatccagatctaacttggggtggctttgtcttcttcttttgccaattccactaattgtttgggtgaagagaaaggaagtacagaaaacatgcagaaagcacagaaaggaaaaccaaggttctcatgaatctccaactttaaatcctgaaacagtggcaataaatttatctgatgttgacttgagtaaatatatcaccactattgctggagtcatgacactaagtcaagttaaaggctttgttcgaaagaatggtgtcaatgaagccaaaatagatgagatcaagaatgacaatgtccaagacacagcagaacagaaagttcaactgcttcgtaattggcatcaacttcatggaaagaaagaagcgtatgacacattgattaaagatctcaaaaaagccaatctttgtactcttgcagagaaaattcagactatcatcctcaaggacattactagtgactcagaaaattcaaacttcagaaatgaaatccaaagcttggtctagagtgaaaaacaacaaattcagttctgagtatatgcaattagtgtttgaaaagattcttaatagctggctgtaaatactgcttggttttttactgggtacattttatcatttattagcgctgaagagccaacatatttgtagatttttaatatctcatgattctgcctccaaggatgtttaaaatctagttgggaaaacaaacttcatcaagagtaaatgcagtggcatgctaagtacccaaataggagtgtatgcagaggatgaaagattaagattatgctctggcatctaacatatgattctgtagtatgaatgtaatcagtgtatgttagtacaaatgtctatccacaggctaaccccactctatgaatcaatagaagaagctatgaccttttgctgaaatatcagttactgaacaggcaggccactttgcctctaaattacctctgataattctagagattttaccatatttctaaactttgtttataactctgagaagatcatatttatgtaaagtatatgtatttgagtgcagaatttaaataaggctctacctcaaagacctttgcacagtttattggtgtcatattatacaatatttcaattgtgaattcacatagaaaacattaaattataatgtttgactattatatatgtgtatgcattttactggctcaaaactacctacttctttctcaggcatcaaaagcattttgagcaggagagtattactagagctttgccacctctccatttttgccttggtgctcatcttaatggcctaatgcacccccaaacatggaaatatcaccaaaaaatacttaatagtccaccaaaaggcaagactgcccttagaaattctagcctggtttggagatactaactgctctcagagaaagtagctttgtgacatgtcatgaacccatgtttgcaatcaaagatgataaaatagattcttatttttcccccacccccgaaaatgttcaataatgtcccatgtaaaacctgctacaaatggcagcttatacatagcaatggtaaaatcatcatctggatttaggaattgctcttgtcatacccccaagtttctaagatttaagattctccttactactatcctacgtttaaatatctttgaaagtttgtattaaatgtgaattttaagaaataatatttatatttctgtaaatgtaaactgtgaagatagttataaactgaagcagatacctggaaccacctaaagaacttccatttatggaggatttttttgccccttgtgtttggaattataaaatataggtaaaagtacgtaattaaataatgtttttggtatttctggttttctcttttttggtaggggcttgctttttggttttgtcttccttttctctaactgatgctaaatataacttgtctttaatgcttcttggatcccttagaaggtacttcctttttaaccttaacccttttagtagttaaataattatttccataggttgctattgccaagaagacctcttccaaacagcacatgattattcgtcaaacagtttcgtattccagatactggaatgtggataagaaagtatacatttcaaggggtaggttttattattaagaaagccaaatgaggattttgaaatattctttcctgcatattatccattctagctacatgctggccagtgggccacctttcttttctgcaatttaatgctagtaatatattctatttaacccatgagtcccaaagtattagcatttcaacatgtaagcatgtcggtaagatagttgtgctttgcttagggttccctcctgtgttatggtctggaaagtgtctttaggcagaaagtctgagtgatcacagggttcactcattaatttctcttttctgagccatcatagtctgtgctgtctgctctccagttttctatttctagacagaagtagggcaagttaggtactagttattcttcatggccagaagtgcaagttctactttgcaagacaagattaagttagagaacaccctattccactttggtgaactcagagcaagaactttgagttcctttgggaggaagacagtggagaagtctttgtacttggtgatgtggtttttttcctcatggcttcacctagtggccccaagcatgacttctcccatgtcaatgagcacagccacattcccgagttgaggtgaccccacggtccagaatcatcctcattctggtgaacctggttctctttgtggtgggcatactgggtaggagaatcacccaaaggtcacccatgagctgcagaaaaaaaggctatttgcagaaggagctcacagatcacattgaaagcattgcatattcaaacatcttggtcttctttattggcatgcccacagggtcttctgacctctgattagatcagacactttttagatattgaatcatcagtttctgtacaactatctgaataaggtatataatcaatgaaatttagaatttttttctatgcttactcctgattggtaatttgtttgggtttagaattctatacaaggccatttgtaattttcctcagcactttaaaaatattaaaccatgttttcttaa

SEQ ID NO: 246 - protein, 335 aa, Homo sapiens
MLGIWTLLPLVLTSVARLSSKSVNAQVTDINSKGLELRKTVTTVETQNLEGLHHDGQFCHKPCPPGERKARDCTVNGDEPDCVPCQEGKEYTDKAHFSSKCRRCRLCDEGHGLEVEINCTRTQNTKCRCKPNFFCNSTVCEHCDPCTKCEHGIIKECTLTSNTKCKEEGSRSNLGWLCLLLLPIPLIVWVKRKEVQKTCRKHRKENQGSHESPTLNPETVAINLSDVDLSKYITTIAGVMTLSQVKGFVRKNGVNEAKIDEIKNDNVQDTAEQKVQLLRNWHQLHGKKEAYDTLIKDLKKANLCTLAEKIQTIILKDITSDSENSNFRNEIQSLV

SEQ ID NO: 247 - DNA, 109 bp, Homo sapiens
gcctttgaaacctcgtcattaattggacacagtgccagagtgtatgcactttactacaaagatggacttctctgtacagggtcagatgacttgtctgcaaagctgtggg

SEQ ID NO: 248 - DNA, 9142 bp, Homo sapiens
aggcagcaccggaagccgctcccctgtgaggctgcggaccgggagcagcggccgcaggtccgggcgccatggctgcggagcggacccggccgctgcaaggctctggcggtccgagcgtgcctagtagctgtgaacccggcgcgaggtcccgggccccggggcgctcgctcaggtaaatttttccataaccttatggagagaaaggactttgagacatggcttgataacatttctgttacatttctttctctgacggacttgcagaaaaatgaaactctggatcacctgattagtctgagtggggcagtccagctcaggcatctctccaataacctagagactctcctcaagcgggacttcctcaaactccttcccctggagctcagtttttatttgttaaaatggctcgatcctcagactttactcacatgctgcctcgtctctaaacagtggaataaggtgataagtgcctgtacagaggtgtggcagactgcatgtaaaaatttgggctggcagatagatgattctgttcaggacgctttgcactggaagaaggtttatttgaaggctattttgagaatgaagcaactggaggaccatgaagcctttgaaacctcgtcattaattggacacagtgccagagtgtatgcactttactacaaagatggacttctctgtacagggtcagatgacttgtctgcaaagctgtgggatgtgagcacagggcagtgcgtttatggcatccagacccacacttgtgcagcggtgaagtttgatgaacagaagcttgtgacaggctcctttgacaacactgtggcttgctgggaatggagttccggagccaggacccagcactttcgggggcacacgggggcggtatttagcgtggactacaatgatgaactggatatcttggtgagcggctctgcagacttcactgtgaaagtatgggctttatctgctgggacatgcctgaacacactcaccgggcacacggaatgggtcaccaaggtagttttgcagaagtgcaaagtcaagtctctcttgcacagtcctggagactacatcctcttaagtgcagacaaatatgagattaagatttggccaattgggagagaaatcaactgtaagtgcttaaagacattgtctgtctctgaggatagaagtatctgcctgcagccaagacttcattttgatggcaaatacattgtctgtagttcagcacttggtctctaccagtgggactttgccagttatgatattctcagggtcatcaagactcctgagatagcaaacttggccttgcttggctttggagatatctttgccctgctgtttgacaaccgctacctgtacatcatggacttgcggacagagagcctgattagtcgctggcctctgccagagtacaggaaatcaaagagaggctcaagcttcctggcaggcgaagcatcctggctgaatggactggatgggcacaatgacacgggcttggtctttgccaccagcatgcctgaccacagtattcacctggtgttgtggaaggagcacggctgacaccatgagccaccaccgctgactgactttgggtgccggggctgcgggttttgggtgcaacctctgcggcagccgactgcatgaaccaaagttctcacctaatggtatcatcacgcagtgcacaatcatttatctatgttttgccaggggccagggctcggggtgggggagggcttgttttattgacatacaacgcagcatgctaatggggtacaccattgacttcatttgtacttagttatgttggtcagtgttagaggatgcattttgggttcatctttcttgagtggagtattggttttaagtaaagaaagttaaatgatccattaatctgctaattggttgcctatgaaatcacattgtctgttattaaagctttttaccatagcctttttttcttttgaagttgaagcaaaggtgctatgatgttgttacagcaactttcctcacacggggtttagctcttataagagccagtgttaaaacttccaccaaataccagtttataaacttccaccaaataccagtgctaaggaaagtctgtcttccagttcaaatccaattctgtaaattgaatgttagcaactcattctaaaccttatatcttggcagagtcaaggttggccatgtttaagatgtgagcgagttctgtagtttttgttgccatgtcggggaagctagtccccggcagcctggatgactgcacagcggtgccctggtatagcagaaaagagcagtgagctggaaggttagagaccgggcctcttaccctggaactctgcaccctctctgggtcccagcttccttgtctgtacagccaggtatgaagctcagtgatttctaagattctttctggtccttcacctactgaaatgtgtaaaagttgatcatgtatttttgtctgatccctgattcatggtttctttcaggtcggataatatttaaatgaaatgactgttacagagttttctataagaacatcaattatatgaaaaggatgaataaaagggaaatgtagaaaatatagctgattccacttagacagtttaagtaattggttgaagaaatgctgatagaagccatggtttaaatagggacacagtatgctatactagaaggatacctgaacccaacctaacttcctcctttgcctctaacttaatctgcagcctcaggcaagttaactttctcttctaagaccatcattttcttcatcttttaagtgagggaattgtcctagatgagggctcacaaacccaaatgcctaagggagccgtgcaggtaacataaatgagtaaaacattctggggaggattgtgctgtcccctggaaagttgatctaatagggcagttattcagctctgttttgtcattaggagaagcaagcccagggttggcaggtcttcacattgtttcaggaggagctagaaatccagatttttatttgaaatcctggatttttaaaacgttacaactgattaaagaaaatttgaaataaggtgagccaaacaaaacatgtccctgggttgccagattgtgtcctcctccctctctaaagttaggtaattttgtgattcagcagtggaaatgttagtggtcacaatcagggagagagtagagggagcaagcagtagaaaaatctcagccgctcttcagctgtctccccttgtattacaagggtggtggggagggatgtatttcattcacagaccaataggaaggtagtttgaagatgaacataagaattggaacctcagtgacagcttatgtctgggaacatgagttattccttcttgctgactccagtataaagcatatccattttacaggtgagaaaaagggttgctggcagagctgagaatgatgtgaactctagagtggggacctatctcttgcagaatctgcattagcatagagccagactctggacctctgagtgctgtgaagttgatagaaattaatggtgaatttcaaggacagatatcattaatatccatgttgaaactctgtggggtttaagcaaaagaacaatatcttcccccatcccacaaaatctgggtttaatctatctcacattgagttctgtgcatcagctctgcttagtactctagaaatagaaccggaatcacaactgaatctattttgcagaagccccaggagactttgggcaatgatgatggtaaatgactttttactttattattatttttttttttttgagacagagtttcgctcttactgcgcaggctggagtgcaatggcacgatcttggctcactgcaacctccgcctcctgggttcaagtgattctcctgcctcagcctcctaagtagctgggattacaagcatctgccatgacacccaactaatttttatatttttagtagagacagggttccaccatgttggccaggctggtcttgaactcctgacctcaggtcatccacctgccttggcctcccaaagtgctgggattacaggcgtgagccaccacgcctggccgagtttttactttttatcgagcctgaacagataactattactgatctaatgaccatccccaccctacctcactttcagatctatccaatagcttcaaagggcaagtaattataatcatttgtgggaaaagttttattaaaaagtgacaaacttgaagctgtatatagtatgttctatttcagtttttagtggtgaatacagaagtcatcaaggtggtacttggtgccgctggaattttttttttttcctaggcagtcttgctctgtcatacaggctggagtacagtggcatcatcatgcagctggattttgacagcagaacttcaggcagtaattggagtcctaatgtcagttcttccttatggaggcctttatttggcctgagattttattcaactactttatagatgctgggtttattcatactatcgccagtttttataaaaatggaaaactagctcatcctttttgcaaaagaaagcaaagtggggagtcagaatgagaagtggataggggataactaaaactattctttactctcctttcattgcctttgagagctagctcttgcacacactgactttggcttccttagcgcataggtaagggaattgcctttccctcttttgtgaatattctcatttctgaaaaattctaagtcatgagaagataagccctatcctttcttacaaggattggatttcttgggtgacactgtggtgtggtggaagccagcggcttctttcaggttcataaaggccatcataacaacttcaggcttcatggtgtggacagggatccaggagagctgagtggatgtgtgaagtttctgatagattctgtcatcattccaaaggaatgtagtttcctccagctcaatcatttgaagtaatacacattgccaaatctgactgtaacctgacattttagacctattggagaaataggaagaaagcccctccagtggaaggactggacttggaagaagttctgcaggaaggtgcatgcaattggatagctgttcatgagtgaaacgtggggaacattgctatgaaattgtaaggtttgcacttcatttttcgtagtttaaaaattgctctgttctggctgttgaaaacacttggtgtgaggtttgaatgaggattatataatcattctagtattcataggaaaatgattactgctctctatttgtaaaacaaaagaaataactttcggaaacagtattttagacatgaggaaattgtttgtattaggcattttgatctaacagaatcagctaaggatagtggatcctggctttacacatttctttgaccaaacccagctggcaacttgaagttgttactgtgtggcttccagattgcctagaggtgaatcctaccaacatcactgttttttttgttttgttttgttttttttgtatgtttttgagacagagtcttgctctatccccaggctggagtgcagtggcgtgatctcggcttactgcaacctcagcctcctgggttcaagcgattctcctgcctcagcctcctgagtagctgagactacaggcgcgtgccaccacgcccagctatttttgtatttttagtagagacgaggtttcactatgttggccaggatggtcttgatttcttgacctcgtgttctgcccgcctctacctcccaaagtgccgggattacaggcgtgagctgctgtgcccggccccagcatcacttttatagctttctgtgcctcttcctctgggccttggtgtatgaagccacttgcctttctctgttgggaagcgagcagaatcagattgctactcatgatgcagtccgggcagggcatactgtcacctttgcctgtggacacagttgtcaggataggggagaagccctttaggtccgtcttcttgacacagccctcctacctggttacgctggtgctttcgcttggtttagacaaccaagacacttgagaattatgctgtcctcagaatgtctgatgaaaagaacagattcacttttttgacacaatgcccattagccatctttggcagtgtttctgatcaaaggttccccatgcctgctctaggaaagtaaacttttttcagaataaatcctcaaatggattactgagtagtctttgcaccattcccatcagcctaatcagactgaatggtcacgctcagtgcaaaaagctgttttgctgttaggatgtttcagtgtttcttgtctttcctggaacagttcagttgtttaaatttagtaattcaatcctgaccagtgtaaacccacttaattattgcagcctaaagaattcagctacttctactcttcataaatgtgcccaagtaaatatgtgtttttaatattcaaccctggaaaattagtaattcagatgataaaagctcatgttttggtgtctttgtactcagattgtgaacaggcatatttcactgatttagacttagtatacttgatgagaatgctcaggttgaagagatagttctgtcagcaatccaacatctatagcaatgtggaaaaagtaatcaactcatatttcacgaatttgatgtatgttgtgatttagagggcatgagataaagtttatatttgaactgtgtggggtagggggaagaagaggttgcttaagcaaatagtggggtgattgtggaacaagatgtctctaagatgagaagttattttcttgcatcatagaagcactctttttacccgtgagtgattgtgttaactataaatcatttatatctgtacattaaagcagattccctcaattaggcaaatttggttagccaagcccaagttattgtttgtacttgaaagtaataaagctgcatttccttaaaaatatattctgtagttaagactttgtcttgctttccccccaaccacttcagacattttatccaaccaatgcagggacttttcaaaagtcagtgtgtttttgaaaatagaacaaccccttgagtgatctgaggtggctctgtttttttactgtttctgcatcttctagaaggtaaactcaacaatataaccatttctgaaggtgatccaaaaagcaaaacaataaaggtaaaacacaaggaaataattttggtgaatttcatgaatagttgcaaatgaagggatggggtgggtaaaagtcccattttgcttccagaccttggaatagtcttcctctcttttgcccaaggatgtgtctatccagcacatctttgcatgagttctttcttactaacttaaacttacggggcttcttgtcatttgagtaccacggccctgcacctttgatcccctgacagcatcattaagggcagattgtcattcctgttttacagatgagaaagctgtggcttggtaaagtgattcattgcctagaggagttatagtaagtggtgaggctgaagccctgattttcagcccccacacacctggattttttccatgttttcatgtttgtctgttctttctgtatttcaagtctcttcaaatcccgactgctgccttctgccttcaccacttgtgtgcactgttcaacctgtcttatgctttgcttccagggagtctccccaaccacttctttgagcacttacttgctcttgttcaatcttggtaactctccgttaccatcagggcacatctggattccttaacatcatggagccctagctaatttcttcgagcaaacagttcttgctcctctatttatttccacccttgcgctttgggtgttaatctcccatcctcgtggaaagttcttgatgttcctttccaccagtcctagggccaggctttaatcccattgatctcccactatctttaaagcctctgctgaccaccataccccactccagcctcactgagcatttttgtgtaaggttagtggtgcagttcatttagcaataaatactgttgtaccttttgcagtagacaactattaactttcatccttgattctcagttttttccaaaatacaagtgaatacctggtttccccagcaacattgtaagattgagagtaggaattcattgagattttaatgaattccatggattgtcttaagagctatctaaacttggaagaaaaataacttccagagcatctaaaattgaaaataaaagatcagaagcaaatgaaagatcaattccacacagcttttcctctcttagacgtccctcttctgccatatcctgtaaacatctgaagtgttctgagtacatttggagagaatatttaatgatcacactgtgattagacatgagtagtccctgccagtgggatgttcctgtcctttgcattttaaccacatgttctgtgctctctgtggtaaagataatctaacagtaataaaaacttatggagaaaattacccagagctcctttatcattacgatttttaatactctcttctaatccttatgcacatgtgtatggatttatgtactgcaaatcattgttttgtaatacattctcaaaaatgtgctttaggtttttacaactaccataatattttgtaattttccttcattactgtaatttgctaaaccatttctgttttggtagataattaggtagtttccagttctgctttttagaagatactacagagaacttctttgtgcatatttccttagaacaagttccagtagaagacttactcgcaaaagcagtggaattttttcttagtattttctgttacaggtacagaagagtgcatacaacacacagttttgtcgaatagttatgaagtgaacacttgtctaaccactgcccgagtcaagaaagaacatttctaaacatgtttgccaatttaatagatataaaggaagtatctcaaggttgctttaactgacatttctttaacacatgacaacatttttatgggggaggggactagagagaaaatgacatatttttatgtgtgcttatttgtatctcttgaattctgtctgcatcttttacccattacactttcaaatacttgtgaaatcattggtcgagatgaattatggctataaataaaatttcactaatctaattatcactgatttagaaataatagttcaacccaa

SEQ ID NO: 249 - protein, 454 aa, Homo sapiens
MERKDFETWLDNISVTFLSLTDLQKNETLDHLISLSGAVQLRHLSNNLETLLKRDFLKLLPLELSFYLLKWLDPQTLLTCCLVSKQWNKVISACTEVWQTACKNLGWQIDDSVQDALHWKKVYLKAILRMKQLEDHEAFETSSLIGHSARVYALYYKDGLLCTGSDDLSAKLWDVSTGQCVYGIQTHTCAAVKFDEQKLVTGSFDNTVACWEWSSGARTQHFRGHTGAVFSVDYNDELDILVSGSADFTVKVWALSAGTCLNTLTGHTEWVTKVVLQKCKVKSLLHSPGDYILLSADKYEIKIWPIGREINCKCLKTLSVSEDRSICLQPRLHFDGKYIVCSSALGLYQWDFASYDILRVIKTPEIANLALLGFGDIFALLFDNRYLYIMDLRTESLISRWPLPEYRKSKRGSSFLAGEASWLNGLDGHNDTGLVFATSMPDHSIHLVLWKEHG

SEQ ID NO: 250 - DNA, 108 bp, Homo sapiens
ccagagagaggagtgagcccaagaagctgtctctgaagggttctcaagtcttgttcactcccgccagcaactggctggttccttggcttcctgcgagcctgcttggcc

SEQ ID NO: 251 - DNA, 1966 bp, Homo sapiens
ctctgccggcttcgccctgacctgtttctgacctgtgttccctccgctgtgccagaacaggccccatgctgctctggacggctgtgctgctctttgttccctgtgttgggaaaactgtctggctgtacctccaagcctggccaaaccctgtgtttgaaggagatgccctgactctgcgatgtcagggatggaagaatacaccactgtctcaggtgaagttctacagagatggaaaattccttcatttctctaaggaaaaccagactctgtccatgggagcagcaacagtgcagagccgtggccagtacagctgctctgggcaggtgatgtatattccacagacattcacacaaacttcagagactgccatggttcaagtccaagagctgtttccacctcctgtgctgagtgccatcccctctcctgagccccgagagggtagcctggtgaccctgagatgtcagacaaagctgcaccccctgaggtcagccttgaggctccttttctccttccacaaggacggccacaccttgcaggacaggggccctcacccagaactctgcatcccgggagccaaggagggagactctgggctttactggtgtgaggtggcccctgagggtggccaggtccagaagcagagcccccagctggaggtcagagtgcaggctcctgtatcccgtcctgtgctcactctgcaccacgggcctgctgaccctgctgtgggggacatggtgcagctcctctgtgaggcacagaggggctcccctccgatcctgtattccttctaccttgatgagaagattgtggggaaccactcagctccctgtggtggaaccacctccctcctcttcccagtgaagtcagaacaggatgctgggaactactcctgcgaggctgagaacagtgtctccagagagaggagtgagcccaagaagctgtctctgaagggttctcaagtcttgttcactcccgccagcaactggctggttccttggcttcctgcgagcctgcttggcctgatggttattgctgctgcacttctggtttatgtgagatcctggagaaaagctgggccccttccatcccagataccacccacagctccaggtggagagcagtgcccactatatgccaacgtgcatcaccagaaagggaaagatgaaggtgttgtctactctgtggtgcatagaacctcaaagaggagtgaagccaggtctgctgagttcaccgtggggagaaaggacagttctatcatctgtgcggaggtgagatgcctgcagcccagtgaggtttcatccacggaggtgaatatgagaagcaggactctccaagaaccccttagcgactgtgaggaggttctctgctagtgatggtgttctcctatcaacacacgcccacccccagtctccagtgctcctcaggaagacagtggggtcctcaactctttctgtgggtccttcagttcccaagcccagcatcacagagccccctgagcccttgtcctggtcaggagcacctgaaccctgggttcttttcttagcagaagaccaaccaatggaatgggaagggagatgctcccaccaacacacacacttaggttcaatcagtgacactggacacataagccacagatgtcttctttccatacaagcatgttagttcgccccaatatacatatatatatgaaatagtcatgtgccgcataacaacatttcagtcagtgatagactgcatacacaacagtggtcccataagactgtaatggagtttaaaaattcctactgcctagtgatatcatagttgccttaacatcataacacaacacatttctcacgcgtttgtggtgatgctggtacaaacaagctacagcgccgctagtcatatacaaatatagcacatacaattatgtacagtacactatacttgataatgataataaacaactatgttactggtttatgta

SEQ ID NO: 252 - protein, 434 aa, Homo sapiens
MLLWTAVLLFVPCVGKTVWLYLQAWPNPVFEGDALTLRCQGWKNTPLSQVKFYRDGKFLHFSKENQTLSMGAATVQSRGQYSCSGQVMYIPQTFTQTSETAMVQVQELFPPPVLSAIPSPEPREGSLVTLRCQTKLHPLRSALRLLFSFHKDGHTLQDRGPHPELCIPGAKEGDSGLYWCEVAPEGGQVQKQSPQLEVRVQAPVSRPVLTLHHGPADPAVGDMVQLLCEAQRGSPPILYSFYLDEKIVGNHSAPCGGTTSLLFPVKSEQDAGNYSCEAENSVSRERSEPKKLSLKGSQVLFTPASNWLVPWLPASLLGLMVIAAALLVYVRSWRKAGPLPSQIPPTAPGGEQCPLYANVHHQKGKDEGVVYSVVHRTSKRSEARSAEFTVGRKDSSIICAEVRCLQPSEVSSTEVNMRSRTLQEPLSDCEEVLC

SEQ ID NO: 253 - DNA, 103 bp, Homo sapiens
cagcttcttccgagggtgacaggtgaaagacccctacagatctgacctctccctgacagacaaccatctctttttatattatgccgctttcaatccaacgttc

SEQ ID NO: 254 - DNA, 1105 bp, Homo sapiens
ctctctcctggtgcagagttgcaagcaagtttatcggagtatcgccatgaagttcgtcccctgcctcctgctggtgaccttgtcctgcctggggactttgggtcaggccccgaggcaaaagcaaggaagcactggggaggaattccatttccagactggagggagagattcctgcactatgcgtcccagcagcttggggcaaggtgctggagaagtctggcttcgtgtcgactgccgcaacacagaccagacctactggtgtgagtacagggggcagcccagcatgtgccaggctttcgctgctgaccccaaaccttactggaatcaagccctgcaggagctgaggcgccttcaccatgcgtgccagggggccccggtgcttaggccatccgtgtgcagggaggctggaccccaggcccatatgcagcaggtgacttccagcctcaagggcagcccagagcccaaccagcagcctgaggctgggacgccatctctgaggcccaaggccacagtgaaactcacagaagcaacacagctgggaaaggactcgatggaagagctgggaaaagccaaacccaccacccgacccacagccaaacctacccagcctggacccaggcccggagggaatgaggaagcaaagaagaaggcctgggaacattgttggaaacccttccaggccctgtgcgcctttctcatcagcttcttccgagggtgacaggtgaaagacccctacagatctgacctctccctgacagacaaccatctctttttatattatgccgctttcaatccaacgttctcacactggaagaagagagtttctaatcagatgcaacggcccaaattcttgatctgcagcttctctgaagtttggaaaagaaaccttcctttctggagtttgcagagttcagcaatatgatagggaacaggtgctgatgggcccaagagtgacaagcatacacaactacttattatctgtagaagttttgctttgttgatctgagccttctatgaaagtttaaatatgtaacgcattcatgaatttccagtgttcagtaaatagcagctatgtgtgtgcaaaataaaagaatgatttcagaaa

SEQ ID NO: 255 - protein, 223 aa, Homo sapiens
MKFVPCLLLVTLSCLGTLGQAPRQKQGSTGEEFHFQTGGRDSCTMRPSSLGQGAGEVWLRVDCRNTDQTYWCEYRGQPSMCQAFAADPKPYWNQALQELRRLHHACQGAPVLRPSVCREAGPQAHMQQVTSSLKGSPEPNQQPEAGTPSLRPKATVKLTEATQLGKDSMEELGKAKPTTRPTAKPTQPGPRPGGNEEAKKKAWEHCWKPFQALCAFLISFFRG

SEQ ID NO: 256 - DNA, 100 bp, Homo sapiens
ttccgaatgccactcttgaactgggtggcactgaaacccagccagatcaccggcactgtcttcacagagctcaatgatgagaaggtgctgcaggagctag

SEQ ID NO: 257 - DNA, 4003 bp, Homo sapiens
gacttcctcccccaaccctgcagctcgccgcccggtcccacggacggggccgccccgatgggacgccgcgctccggcccctgcgcgccgctgagccgagcgccccccgctgccgagacccccgccgccaccgccagccgctgccccctcgcccccgcccgggccgggagcctcgtccccgtcccccggaaagctggatttccgaggctggaggcgcctggccggctgggtggggaccaccatgggcaacgcggccggcagcgccgagcagcccgcgggccccgccgcgccgccccccaagcagcccgcgcctcccaagcagccgatgcccgcggccggagagctggaggagaggttcaaccgcgccctgaactgcatgaacttgcccccagacaaggtccagctgctgagccagtatgacaacgagaagaagtgggagctcatctgtgatcaggagcggtttcaagtcaagaatccccccgcagcctacatccagaagctgaagagctatgtggatactggtggggtcagccgaaaggtagcagctgattggatgtccaacctggggtttaagaggcgagttcaggagtccacgcaggtgctacgggagctggagacctccctgaggaccaaccacattgggtgggtgcaggagttcctcaatgaagagaaccgtggcctggatgtgctgctcgagtacctggcctttgcccagtgctctgtcacgtatgacatggagagcacagacaacggggcttccaactcagagaaaaacaagcccctggagcagtctgtggaagacctcagcaagggtccaccctcctccgtgcccaaaagccgccacctgaccatcaagctgaccccagcccacagcaggaaggccctgcggaattcccgcatcgtcagccagaaggacgacgtccacgtctgtattatgtgcctacgcgccatcatgaactaccagtctggcttcagccttgtcatgaaccacccagcctgtgtcaatgagattgctctgagcctcaacaacaagaaccccagaaccaaggctctggtgctggagctgctggcggccgtgtgcttggtgcggggaggacatgacatcatccttgcagcctttgacaacttcaaggaggtgtgtggggagcagcaccgctttgaaaagctgatggaatatttccggaatgaggacagcaacatcgacttcatggtggcctgcatgcagttcatcaacattgtggtacattcggtggagaacatgaacttccgtgtcttcctgcaatatgagttcacccacttgggcctggacctgtacttggagaggcttcggctcaccgagagtgacaagctgcaggtgcagatccaggcgtacctggacaatatttttgatgtgggggcgctgctggaggacacagagaccaagaacgctgtgctggagcacatggaggaactgcaggagcaagtggcgctgctgacagagcggcttcgggacgcggagaacgaatccatggccaagattgcagaactggaaaaacagctaagccaggcgcgcaaggagttggagaccctgcgggagcgcttcagcgaatcgaccgccatggggccctccaggcgtcccccagagcctgagaaagcgcctcccgctgccccgacgcggccctcggccctggagctgaaggtggaggagctggaggagaaggggttaatccgtattctgcgggggccgggggatgctgtctccatcgagatcctccccgtcgctgtggcaactccgagcggcggtgatgctccgactccgggggtgccgaccggctcccccagcccagatctcgcacctgcagcagagccggctcccggagcagcgccaccgccgccgcccccactgcccggcctcccctccccgcaggaagccccgccctctgcgcccccacaggccccgcctctccctggcagcccggagcccccgcctgcgccgccgctgcccggagacctgccgcccccacccccgccaccgccaccacctccgggcactgacgggccggtgcctccgccgccgccgccgccgccgccgcctcccggaggtcctcctgatgccctaggaagacgcgactcagaattgggcccaggagtgaaggccaagaagcccatccagactaagttccgaatgccactcttgaactgggtggcactgaaacccagccagatcaccggcactgtcttcacagagctcaatgatgagaaggtgctgcaggagctagacatgagtgattttgaggaacagttcaagaccaagtcccaaggccccagcctggacctcagcgctctcaagagtaaggcagcccagaaggcccccagcaaggcgacactcattgaggccaaccgggccaagaacttggccatcaccctgcggaagggcaacctgggggccgagcgcatctgccaagccattgaggcgtacgacctgcaggctctgggcctggacttcctggagctgctgatgcgcttcctgcccacagagtatgagcgcagcctcatcacccgctttgagcgggagcagcggccaatggaggagctgtcagaggaggaccgcttcatgctatgcttcagccgcatcccgcgcctgccggagcgcatgaccacactcaccttcctgggcaacttcccggacacagcccagctgctcatgccgcaactgaatgccatcattgcagcctcaatgtccatcaagtcctctgacaaactccgccagatcctggagattgtcctggcctttggcaactacatgaacagtagcaagcgtggggcagcctatggcttccggctccagagcctggatgcgctgttggagatgaagtcgactgatcgcaagcagacgctgctgcactacctggtgaaggtcattgctgagaagtacccgcaactcacaggcttccacagcgacctgcacttcctggacaaggcgggctcagtgtccctggacagtgtcctggcggacgtgcgctccctgcagcgaggcctagagttgacacagagagagtttgtgcggcaggatgactgcatggtgctcaaggagttcctgagggccaactcgcccaccatggacaagctgctggcagacagcaagacggctcaggaggcctttgagtctgtggtggagtacttcggagagaaccccaagaccacatccccaggcctgttcttctccctctttagccgcttcattaaggcctacaagaaagctgagcaggaggtggaacagtggaaaaaagaagccgctgcccaggaggcaggcgctgataccccgggcaaaggggagcccccagcacccaagtcaccgccaaaggcccggcggccacagatggacctcatctctgagctgaaacggaggcagcagaaggagccactcatttatgagagcgaccgtgatggggccattgaagacatcatcacagtgatcaagacggtgcccttcacggcccgcaccggcaagcggacatcccggctcctctgtgaggccagcctgggagaagagatgcccctctagcccctcagatctgcggaaccagccctacatccgcgcagacacaggccgccgcagtgcccgtcggcgtcccccgggccccccactgcaggtcacctccgacctctcgctgtagccgctatttctgcaggtggattctgcaggggtgtggggccgtggacaggctgaggctcaaggaaggtggtcctcagctcggctggccgggcagcccctcctccgctgtggcccgcctcaaacgggctggtgcatcctcctcttggccacagagggcagcatcgcccgccccttcccccaaatgctgcttgcagcacccaccctaaagccccctccaaatagccatacttagcctcagcaggagcctggcctgtaacttataaagtgcacctcgcccccgcaagccccagccccgaggaccgtccatggaccttatttttatatgagattaataaagatgtttgcaaaa

SEQ ID NO: 258 - protein, 1100 aa, Homo sapiens
MGNAAGSAEQPAGPAAPPPKQPAPPKQPMPAAGELEERFNRALNCMNLPPDKVQLLSQYDNEKKWELICDQERFQVKNPPAAYIQKLKSYVDTGGVSRKVAADWMSNLGFKRRVQESTQVLRELETSLRTNHIGWVQEFLNEENRGLDVLLEYLAFAQCSVTYDMESTDNGASNSEKNKPLEQSVEDLSKGPPSSVPKSRHLTIKLTPAHSRKALRNSRIVSQKDDVHVCIMCLRAIMNYQSGFSLVMNHPACVNEIALSLNNKNPRTKALVLELLAAVCLVRGGHDIILAAFDNFKEVCGEQHRFEKLMEYFRNEDSNIDFMVACMQFINIVVHSVENMNFRVFLQYEFTHLGLDLYLERLRLTESDKLQVQIQAYLDNIFDVGALLEDTETKNAVLEHMEELQEQVALLTERLRDAENESMAKIAELEKQLSQARKELETLRERFSESTAMGPSRRPPEPEKAPPAAPTRPSALELKVEELEEKGLIRILRGPGDAVSIEILPVAVATPSGGDAPTPGVPTGSPSPDLAPAAEPAPGAAPPPPPPLPGLPSPQEAPPSAPPQAPPLPGSPEPPPAPPLPGDLPPPPPPPPPPPGTDGPVPPPPPPPPPPPGGPPDALGRRDSELGPGVKAKKPIQTKFRMPLLNWVALKPSQITGTVFTELNDEKVLQELDMSDFEEQFKTKSQGPSLDLSALKSKAAQKAPSKATLIEANRAKNLAITLRKGNLGAERICQAIEAYDLQALGLDFLELLMRFLPTEYERSLITRFEREQRPMEELSEEDRFMLCFSRIPRLPERMTTLTFLGNFPDTAQLLMPQLNAIIAASMSIKSSDKLRQILEIVLAFGNYMNSSKRGAAYGFRLQSLDALLEMKSTDRKQTLLHYLVKVIAEKYPQLTGFHSDLHFLDKAGSVSLDSVLADVRSLQRGLELTQREFVRQDDCMVLKEFLRANSPTMDKLLADSKTAQEAFESVVEYFGENPKTTSPGLFFSLFSRFIKAYKKAEQEVEQWKKEAAAQEAGADTPGKGEPPAPKSPPKARRPQMDLISELKRRQQKEPLIYESDRDGAIEDIITVIKTVPFTARTGKRTSRLLCEASLGEEMPL

SEQ ID NO: 259 - DNA, 104 bp, Homo sapiens
aagctggggctagaggagttcctgcagaagtcaaggcacacagagagcgagaagctgcaggtgcagattcaggcatatctggacaacgtgtttgatgtcggggg

SEQ ID NO: 260 - DNA, 12740 bp, Homo sapiens
gcctccgtccgccttgcttcggtgcggctgtccgctacgctgcctccgccctcgccgcgcgcccccgccagcgggactccagggaacccccggcgccctcgacggggccgaggagtcgggactcggggagccggcgctgagggaggagcctggtcggagccgcggagccgaaagctccggagcgtggaggtggggggccgaggcccctgagggggccccgccgcgatgggcaacctggagagcgccgagggggtcccgggagagcccccctctgtcccgttgttgctgccgcccggcaagatgccgatgcctgagccctgtgagctggaggaaaggttcgccctggtgctgagctccatgaacctgcctccagacaaggcccggctcctgcggcagtatgacaatgagaagaaatgggatctgatctgtgaccaggaacgattccaggtgaagaatcctccccacacttacattcagaaactccagagcttcttggaccccagtgtaactcggaagaagttcaggaggagggtgcaggagtcaaccaaagtactaagggagctggagatctctcttcgcaccaaccacattgggtgggtgcgggaatttctgaatgatgaaaacaaaggcctggatgtactggtggattacctgtcctttgcccagtgttctgtcatgtttgactttgagggtctggaaagtggtgacgatggtgcatttgacaaactccggtcctggagcaggtcaatcgaggacctgcagccacccagcgccctgtcggcccccttcaccaacagcctcgctcgctctgcgcgccagtctgtgctccggtatagcactctccctgggcgcagggccctgaagaactcccgcctagtgagccagaaggatgacgtccacgtctgtatcctttgtctcagagccatcatgaactatcagtacggattcaacctggtcatgtcccacccccatgctgtcaatgagattgcacttagcctcaataacaagaatccaaggaccaaagcccttgtcttagagcttctggcagctgtgtgtttggtgcgaggaggtcacgaaatcatccttgctgcctttgacaatttcaaagaggtatgcaaggagctgcaccgctttgagaagctgatggagtatttccggaatgaggacagcaatattgacttcatggtggcctgcatgcagttcatcaacatcgtggtgcactcggtggaggacatgaacttccgggtccacctgcagtatgagtttaccaagctggggctagaggagttcctgcagaagtcaaggcacacagagagcgagaagctgcaggtgcagattcaggcatatctggacaacgtgtttgatgtcgggggtttgttggaggatgctgagaccaagaatgtagccctggagaaggtggaggagttggaggagcatgtgtcccatctcacagagaagcttctggacctagagaatgaaaacatgatgcgggtggcagaactagagaagcagctgctacagcgggagaaggaactagagagcatcaaggagacatatgagaacacaagccaccaggtgcacaccctgcggaggctcattaaagagaaggaggaggcctttcagcgtcgatgtcatttggagccaaatgtccggggcctggagtctgtggacagtgaggccctggccagagtaggccctgcagagctgagtgagggcatgccaccctccgacctggaccttctggctccagccccaccccctgaggaggtcctgcctcttcctccaccaccagctccgcccttgccccctccacctcccccattaccagacaagtgtcccccagccccacctctccctggtgctgcaccctctgtggtgttgacagtgggcctgtcagccattcgaattaagaaacctatcaagaccaagttccggctgcctgtcttcaactggacagcactgaaacccaaccagatcagtggcactgtcttcagcgaacttgatgatgagaagatcttggaggacctggatcttgataagtttgaagaattattcaagacaaaagcgcagggccctgcccttgacctcatctgctccaaaaacaagacagcgcaaaaagctgccagcaaggtgactctgttggaagccaatcgtgccaagaacctggccatcaccctacgcaaggctggccgctcggctgaggagatctgcagggccattcatacgtttgacttgcagacactacctgtggacttcgtggagtgcctgatgcgcttcctgcccacagaggctgaggtaaagctgctgcggcaatatgagcgggagcggcagcccctggaggagttggcagctgaggaccgcttcatgctgctcttcagcaaggtggaacggttgacccagcgaatggctggcatggccttcctggggaacttccaggataacctgcagatgctcacaccgcaactcaatgccatcattgcggcgtccgcttccgtcaagtcttcacagaagctgaagcagatgttggagatcatacttgcactggggaactacatgaacagcagcaagcggggagctgtgtatggcttcaagctccagagcctggatctgctgctggataccaagtccactgaccggaagatgacactgcttcatttcatcgccttgacagtgaaggagaaatacccagacctggctaacttctggcatgagctgcactttgttgagaaggctgcagcagtgtccctggagaacgtgctgctggacgtgaaggagctgggccggggcatggagctgattcggcgtgagtgcagcatccatgacaacagcgtcctccggaacttcctcagtaccaatgaaggcaaactagacaagctccagcgggacgccaagacggctgaggaggcctacaatgcagttgtgcgctactttggcgagagtcccaagactacacctccttctgtattcttcccagtatttgtccgattcattcgttcttacaaggaagcagaacaagagaatgaagcccgcaagaagcaggaggaggtaatgcgggagaagcagctggctcaggaagccaagaaactggatgccaagaccccatcccagcggaacaagtggcaacagcaggagttaatagcagagttgaggcggcgccaggccaaggaacaccggcctgtttatgaggggaaggatggtaccatcgaggacatcatcacagtgctgaagagtgtccctttcacggcccgtactgccaagcggggctcacgcttcttctgtgatgcagcccaccatgatgagtcaaactgttagcccccaaggttggggcccgacaggcctccactgccagcctatggttgttcgccaccaagccaggagtgctgcaccgcccagtggtccccctcgggctccaggcccccactgagaccctctcggaggcagaagcacttcacccctcagagtcctacaagtccaaccagtggacctggaattggccaagggctcaggagagggctgtgttgctctctcaaccatgtccgccccagctcttgaggctggatctttctacttgtgccactatgggcactaggtctgtaggtccctggtgcttccagtactgcactttgcccccaaggtctttgacttcatttcctgaagggtcaccaagggtcagctcagggctaggaaaaaccatttccagccttagcctaaacagggcacatagatctctcccactagagcccagagggatgagaggagagagcaactgttctttctttttttttcccttcctttttgcaggcccatggtcagctctggtctagatgtatctaggcttagggagccctgggaccctgccagtctcagttcatctcttaccaggagcaaggccctctgaagcatgggccgtgccagctgtgccctagtgataagggtaagaggagagatgtcaggctcactgcccttatttctctgcccatttcattctaggctcacactgtccttgtcaaggtgggcagaagagcagaggtcttctctgcaccaaccactctctgcagatggctggagaaagggtgtgccaactcttcaccttctttcctcagctacggtttttttttttttttttttttttttggcaggggacaaggagcatggtggtcttggctatttgcttaccttcccgtttctcctctgcccctggaagggaatgtgggggcccacttttttgtacatgtaccacctccctttcctcttactgtacataaacctcagactctccccctctcaacaaaggcttgatgcaccaggcctgactttgtctcctctttctgagcttagggggctagggtggccatttagtctgacctgggctatggggatagaaaagaaatctttggggcactgcatctgttttggaggagatgagatcagaactctggggaaaggagaaccggctaggtgggctctagccacacaaagggaagcaggcctgccatgagacactagtgccctctgctgggcatgtgtccagtccccagcctgccccagtagcacatggaaaagagtcactggccatgttataaatattgttatttaaaaaacaaaaaacaaaacacacgtacattaggtcctgggtggaggaagaagtggtggagcctcagggccagggcaggcaggagcaggcactgatgctagagggtgatgaccctgccctctgccacccaggctgcgtccaacagcctgtgactcttccctggagaccccttctctcacacttttatctactggcatcacccaccccacatggcatataccacccatctctggtctggggctgagggcaaggactgcactagtccagggagtaggggacccttgaacaccaagagcaaccttgagaggtgccaacaatggtgtgctgggggtggggttactttagaaaaagtggacacagaccagactaaggaagaagtctgaggcagacggtgagggtggcccaggagccatggcctcacacagacccgaggcagagaacagctcattgggtcactggtgatcatccagctgctgtaggagtgtccgccgccgcctctccagctcaccctcactcagctcactttctgacgtgtcccagcctgtctgttggagcaaaggcacagttcacccttagcctgcactaagggccgtggaagcttgaccagcgtgctgactggcctagggcccctgcccctcaccttctccttcttgattccaaagcctggggaacggttagggagctctgcctgttggagctccctgtccttgtcctgttcttgttctttctcatcgctctccttgccagctttctcctcagggtctgtctcactctcaggactattctgtaagagtccagagcccacctcctcagttcctgtggatagcctgggaggcaggtagaacagaactcacaaaatagcaggggcttaggtagaagttccttcactcaccgacttgtgtcttctcttcttagttttcttttttggtttcttggctttccgaaggccatgatctagagatagaaaaatccctactaagtcccaacaggagaaagacaggctctttttctttgttctagcccctctgttcattcttcacaggcaggaacctcatgctctgaggaagtctaagtccagttttccttctccagcttcttgcttgggcaggtagaggaagttctttctacttccacaggtgcagccctcccaatccagtctaccctcaaaggagctggggcttgtggagggcatcctctcagtctgggacaacagttctccagcttctacgctcacagcaactgcttacctgctccaagaagatgggaggaaggggagccccgtcctccaagggcagcacccccactttcaactgaatcaagtgaggaagagggctcagagcctgactctgaggggttccgcctcctccgcttggggggccggagagatggtgggggcagctcctcttcttctgactcagagccctgggcagatcagcagatacatgtcagtgcagaggttctctgccctccagaagccctcgtctgggaattcgagagaggaggaggacccagggccaaaggaatcctcaaacttccctccaagggagatattgtaaggggaaaacaaagtgtttatttccccaaaacaacccagcttcaccccatgtcccttctacacgcttactcactgagggtgagtgggaacgcttgtgatggtgcttcttgcctttcctgccatgctttcggcctttggtgtggaggtgctggcattcagtctgctagaggcagaggaagaagggtgaggacagcaccagacttagccccaggaaggatcctacttcctaaaatctggctttgcctccctttctcagactagagccttctgcctatcccagggatcctcaggcctccccttccttagctggccaggagtgccctaagggtaagagggaggccactgaggtctctgttgaactggtctaatgagttcaagggcctgaggcagatccagaggacaagcctgcctcacctccagcacctgtaggaactcccggaagagccggatccgctccgactccagggtgatctgctcaaaggctgagtcacacacaaaacgctcacggaccttgaacgaggagagcactgctgatcagactaggccccactcagcctggcctggacaccgccatgagcacagggcagggctggggcagagaaaggaagggaactggagctggcccagggctgtgacgtgactggggtgggccctcagtggtgaagcaccgctgccctcaggcttgaggggtgcttggggccaggctacgctcctgacctcttcccaggcagtgcctagctccagagcaggcacagcctgcctcagcatgcttcgaaaggcagcttccctgcgccgcatcctgcgtgcctcctccttctcccgctccctctcccgtgcctctgctttctccagcagctgaggaaagaagggacacggaacagggtcacccaggagggtggatgccaggtcccactcaggcataccttaggaggtggaaagttagggtctgggcttctaccaccatcccctgaattgggaatatagtcagtgggacagtgagtgagaaggaatggagcaagacacagatgaattagagaacttcccacgccccgcccagcccctcacactattgaaggtcagcttgatgttgcctgcgtccagtgcggcagccctcttgtcaaagcttatgacgtgggcgaagtcctcaaaggccgtgttcacctccacgcagaagccccggtcctgtgggtacagcagtgcatgaagcaggggcaccacgtgcctgaggccaaagctggcaggcagagtggtcacattacagatggtcaagaaggcccttgcctctggaagagatccacaggactgtggtctgcattagaaaccaagttatccaagtcctcatcacttgacaattaagcccccatgcctacccttggtttggatgtcacacagagctgaaggggttgggagatgtctcccaactgctgattaatgctgagtttctcaaaattaacttttgttcctttggcttaaagctctggccccagctgggccctcctgctgctcagcagtgcttccatgcattctcaatcaacatttgctggcccctaccctttgggtctatttattgagtgcttactatgtaccaggtaccatgatgagtgtttcacacattatctcatttaatcctcttggttctacatttaagaataggtcctagtatcctaattttacacagaaggagaaaccaaggttcagagaaactagagcacttgcccaaggtctcacagctgatatacggctgggcaagaaccctaccctgggggggctctctatccccaaagtgtctgctttcaagcaccacacccacccagatgacttagtccatgggagaaacggaggccaccaggtgtgcagctccccaccaatactaaaaacatgtccacaggccaggctctatgcttctcatttaggcctcacaacattccagtgaagcagaggcttagaaaagtgatctcagttggcccaagatgacatgagtggtaaatgaagccactggagttcaaagtctggctctcacgtcagttaagcacaggccagattccctttctctccctccacatagctctcacctcctctggcctttttgctgatggcagaggtgtgctcctctttcttctttccaagggtacttcctcaaccctgctacagtccttatcaacacagcattcattctcagggaattgaaagctccaagtcacccttgttactggctccttccatcaagcagacacctcacctaacctggaacatcctttccaccatgctctccccttcatcaagctaactacctctgctcttttccattgtttcaaaacctcttgaaatgcagcagaaaggaaaaggaataaacatttattgagaacctattagacactttacagatgttatttaattctcacaaccttacctatgaattatccctgatttacaggtgagcaaacaggctcagagacacggaacttacggaggtctcagagccaataagcaaccaggagtaatctgactctaaaacatgtgctgcccccatgccacctccatgactctactctcccaaaggttgcttgtgtctactagccaaatccaaggccgccttctttgtcctcactcatctggtcctcagtgcctctaccacttacttcttcaacactcccctctccaggtcacaccctctctgaccttttattctcttgcatatgcatgttcctgagaacagcacttagtcctctttcactacccaatctgtactccctcgcaatctcatccttcatctctcctgattttcaaacatcctagactggatatttcagacacttaaaattcaacagatctcaagagaatatatttctcatgagcatcctccatggatctccctgacccggatctgtctgcctgttctaagtccagggctctttgcattatcctatgggatgaaaggcaccatcatggtctgcctggctgtggaaagcaagagggactcctgggctcatctgccctccataggcaggaacccaaatggggaaagaggaagggaactgtctaaaaaagttgctttctcaggttgtgtggagagacaggactcagtgaggataggcccctacaggcctatcaaccagccactctgtggctaaaagttaattgtccaataaaatttagctatcccaggataaggcatttctactttatacgattattctgttttaaaatatatttgctttgagagtaattccccaaatagaattcctattttctacagccttgctcttcttgttttatccttatcaatagtgccatcatccactgccctgacacctctgattccttcctttccctccatttcacaaaatctatcaattctacttagtgactctatcccactggtgttgaattctcccttttttttttaaacagcagaaacagtttattaaaatagaaatcttatgtagaacctttatgcataaaaaagattcaagctgcttcacttgaaaacaggaagcagcaccaaatccccccatactcaactccaacccttgcttgtctcaaggcacctacatagaaacccagagtgtctcagaagaacagctggagcgctacagcctgctctcttctgctgtccccactgcccccggctaggatcacctcctacaagattcctgcacagcctactgacttttctccctgctcaccctcttccatccctctaacccagctcctagcatctagtgcttcttggacttttgtaccaagtagccccaacagtaggagagaggtctggggataagtgaaatgaatatgactatttgaattaccactatcagttttagtatcttgaggcttcaagaactgctctacctagcaccaccaccttccctaaggacataagtacgtactctagactgaaaggttctactatacaccatctaatctgatcattccccggttcctcattacttacgagagaaaaatccaaatttcttattttagcattcaaggcactttacatgcagggctctacttccaagctggggcatgtggttccagagaaagagaggatacctcaggacagtatgatacatcttacctaatggtaagtaatttaaaatattaaatttatattaaataggtaatatggtgttaaaatgcaacacctacgtgaatttgtaaggcaaaacagtacttcaaagaaatgtatatgcagtgagacatttctagctttatttccagatccctttcaacccaggtaccatttaatctctgtaattaggtgtactctggtggaacactcaccattttttagatgaggaaacagggtcagaaaggtcaagtgacctatccaaggtcacacaactagcaagcagttaagctagacttttactgtaggcagtctgcctccagtcccgctcctaaccactgtactgtattatctcctcaaatgcattagaatcttcacttccataaagaaatatgctctttgtttttttcttttggaacacaaggtttagtccatcactcactcacttttccacttttgataagatgtaaatattgagaactatttctcttctccagtagaagaagagcaacaggccatgtgtgatggtaaatggcagctgacacttgcgacagtatcaagaaggcactaaggaatggtgagaaggatgacttgccctttctaaagtggcatctcagcttgagtctgcagaatgccttgcaaatccagctcagtactgctagataatccatattgacaagagaagctaaagattcagattttctatgtgaagtttcctggttttaaaatgttagcaacaaattccaaatttttacagaacactgtacaggccagaaagaacaatctgtgtgctaccagtttacaattagctatgcttcttcctcctcagacctggcatgccctttccacccccttgcctttgctcttagtaccccgtgtacactccaacctcttccacctacaaatttctaaatgcacagttcaaatgttagttcttcagattcctgtctctgtaataacacttgcccctttgtataacagttctcatgtatatcttcctattagaccatgagctcctgtggtagaaattgtgtattcattactgtatccctagtgtgcagtaaaggatcacagtagatatctgctgaaccaagctgtaatgcttctgcaaaacaggacttatcagggagtcctctgcagggagtgtgccctgcatccatcctgtatccatccataaccccagcctccctcaccttaaggatgtccttaatgatcttcttttcatcatggaatcgtgccttcaactcctccacatagaacttgaataagtccagaggggtggagcctgtaaggagggagggaggggggcctggcgggcggcagcttcccaaggcctgggggctgggccgaggacaggagccggtagtagggggtgcagagaggctggcagggcaggaagccaggccagagaagggggagcctggctgccttacccggctggcccagcatgttggcaaagcggacatcagtgctgactgctggatatagctccatccaggtggacatagagtgcagctgccctgtctcatgcagctcgtccaggaaggtctgagcagggagaggccagttatagggagagtgagacagggaggcagagccacagactgagggggaagagagggaatggcagaggaagaggcagggacaatcaagattgaggaaatgcaggcaagagaggcagagatgaagagatgcagatggaaggctgagaacaatgcaaaaagagagaaagtaaatacacagagagggacagaacaaaaaggtgagaacaagccagtcccgggatgcaaagaaacagaaacctgcctgcagtaacccctagcactaccaccaccactgccacccccaagctgagggaataaactctgcctgtcgggtgccccaccaagggaaataaacatggcctagctgccaagtcatgcctgtagggtgctctctactggcagtttctgggtggtgcatacatctagtctccctagaagagcacagtccagaattgaggaggtacagcagaaacagactgcaggcagagagaggtctcatagagcttggacagggctaggcacagaaagaacaggcagcgtatccagaagggggcagggaatgggtgaagaggttgtgctctagggcagagctgagctctgatctagaaaggacagcaaagatacctggaaggcctcccgattcttgcgttgttggcgtcgctcccgaagccgggcccgctcccgttcctcctcctcttccctctccaaagctcggatgtgctcctcaaaacagatcagtgcatcttccttgtccatgtctaaagacaggcaggaggttccgcgggcattgtcccagcaggataccctctcagaccccagcacccctaatgtttcaacgatgctgtcctacaggtgctagggatacccagggtggtgggggaagggcctggagggggctctgtgggagcagccactgcaatggtagttcttaagaggggatcattaattgtataagaataaataagcaagtattca

SEQ ID NO: 261 - protein, 1028 aa, Homo sapiens
MGNLESAEGVPGEPPSVPLLLPPGKMPMPEPCELEERFALVLSSMNLPPDKARLLRQYDNEKKWDLICDQERFQVKNPPHTYIQKLQSFLDPSVTRKKFRRRVQESTKVLRELEISLRTNHIGWVREFLNDENKGLDVLVDYLSFAQCSVMFDFEGLESGDDGAFDKLRSWSRSIEDLQPPSALSAPFTNSLARSARQSVLRYSTLPGRRALKNSRLVSQKDDVHVCILCLRAIMNYQYGFNLVMSHPHAVNEIALSLNNKNPRTKALVLELLAAVCLVRGGHEIILAAFDNFKEVCKELHRFEKLMEYFRNEDSNIDFMVACMQFINIVVHSVEDMNFRVHLQYEFTKLGLEEFLQKSRHTESEKLQVQIQAYLDNVFDVGGLLEDAETKNVALEKVEELEEHVSHLTEKLLDLENENMMRVAELEKQLLQREKELESIKETYENTSHQVHTLRRLIKEKEEAFQRRCHLEPNVRGLESVDSEALARVGPAELSEGMPPSDLDLLAPAPPPEEVLPLPPPPAPPLPPPPPPLPDKCPPAPPLPGAAPSVVLTVGLSAIRIKKPIKTKFRLPVFNWTALKPNQISGTVFSELDDEKILEDLDLDKFEELFKTKAQGPALDLICSKNKTAQKAASKVTLLEANRAKNLAITLRKAGRSAEEICRAIHTFDLQTLPVDFVECLMRFLPTEAEVKLLRQYERERQPLEELAAEDRFMLLFSKVERLTQRMAGMAFLGNFQDNLQMLTPQLNAIIAASASVKSSQKLKQMLEIILALGNYMNSSKRGAVYGFKLQSLDLLLDTKSTDRKMTLLHFIALTVKEKYPDLANFWHELHFVEKAAAVSLENVLLDVKELGRGMELIRRECSIHDNSVLRNFLSTNEGKLDKLQRDAKTAEEAYNAVVRYFGESPKTTPPSVFFPVFVRFIRSYKEAEQENEARKKQEEVMREKQLAQEAKKLDAKTPSQRNKWQQQELIAELRRRQAKEHRPVYEGKDGTIEDIITVLKSVPFTARTAKRGSRFFCDAAHHDESNC

SEQ ID NO: 262 - DNA, 107 bp, Homo sapiens
cccggagccatggcctagtactcttatgtgaagtctagcaagctcgtgctcaagggaaccgagtaagaagaaaaagagcaaagataagaagagaaaaagagaagatg

SEQ ID NO: 263 - DNA, 3282 bp, Homo sapiens
ccccccccctcccggcagaaacctggaagtggaaatctcgggcattcaccgtttgggtgaagacggaggcgggttctggacagacgtaggctgtcagggagtgtttacttcgcctccacttctgttcctccctgccctggtgctgctccaggtcacatactcgtcctgagccggcttcagcctgtccgcgcagaagtctcccggagccatggcctagtactcttatgtgaagtctagcaagctcgtgctcaagggaaccgagtaagaagaaaaagagcaaagataagaagagaaaaagagaagatgaagaaacccagcttgatacgttggaatctggtgaacagtaacaaactttggtgaaatttcaggaaccatagccattgaaatggatgagggaacctatatacatgcactcgacaatggtctttttaccctgggagctccacacaaagaagaatcgccctgaaatctggctatggaaaatatcttggtataaattcagatgaacttgttgggcattcagatgcaattggaccaagagaacaatgggaaccagtctttcaaaatgggaaaatggctttgttggcctcaaatagctgctttattagatgcaatgaagcaggggacatagaagcaaaaagtaaaacagcaggagaagaagaaatgatcaagattagatcctgtgctgaaaaagaaaccaagaaaaaagatgacattccagaagaagacaaaggaaatgtaaaacaatgtgaaatcaattatgtaaagaaatttcagagcttccaagaccacaaacttaaaataagtaaagaagagagtaaaattcttaaaaaggctcagaaagatggatttttgcatgagacgcttctggacagagtctcagtcatagcctgccttcatctctgaagggaccaggcgacccatggagtgcctcggcagcctcgtcattgcatgcaatcttcacagacaagatctcactgcaaccacgtttctacaggagcacaggtgtgacattatactgatgacatcattctcagagaaaattcattttacatactaaggacacacagatacaaggaggcttacacaaagggagtggacctctcctcaacacagtagtgcaaggccctgccactttgcttcaattcctgaaaattccttggtaaacttggggctgctctattcctgacactttcaaaaaacagttattcatcctctcagcatccacaatgttaatacaaacccaacattcttcaatttgtgttttgttttttggaggcacagtcttgctctgtcacccaggctggtatgaagtggcacaatttcagctcactgcagcctcgacctcctgagctcaagcaattctcccatctcggccttccaagtagctcggactgcaagtgtgtgccacgacactcagctaattttgtttaattttttgtagagaaaaggtctcgctatgttacccaggctggtctcaaactcctgggctgaagggatcctcttgcttcagcctcccaaagttctggggttacagttgtgagccactgtgcccagccctttaattctttacttggggttcaggtgacaacatatttcttgtttacaaatcttacttaatctcactgatgctgtcattggcaaactgacccacctcgaatgaagcctcctccaacaagtctggaatctgtccaaatttaaattaacaggtacttctatgaattccctcagagaacacactgtggatgctttagagacctcttcccatgcatcctgaattatctgggttgcatatggtggccataagtagtccatgggcttctgatgtaaaaacaaacctgccccttttgaccctgctctgtacagcatcagggcagtgattgctgaccatatcctggaccctctggaaacagagggctctgcatccatgtccatgagccttcatgcccatctggccatcaggccttgggaagcagcaccccacagccttggcacagctgcagagacctccttgcctcaggatggagtcaaacctggaccccctgccattctcatctgcaggaaacactgccctccttcattctcaggctgtgttgctggaagtcacccgtctccgaggacccttgggatcgactgagtgaccagcagtgaagttcatccaccttctgaatggatgccatcatctgacatgatggagcgcagtgggatgctgctgccttccctcccttagctaggatgtccctgataaaggatgacacccaagcctcagcacaactggccaaacttgaggtggtcatctcagcactgatgctgggccaacaattagccccatttgtacatttttacaaatttttggcaattgtcaagaattgtccaccttccctccccattgaattaaagaaacttcttgcctcatggatactcagaatacaatcaaggtaacagatgcctttttttttaaccaaggacacagtacagatctcacagggacactccttatctcctgcagagttccagacactactgatggtgaccaaggcaacattcatcggaaaacacagtgctaggcttgtgaaagtgtccagtagggcttccactgcccctataggctgcaggcagctgctttagttgagagagagactgagctcctcaaagaattcctatttaagttacaaagcagcgagtggatgccctgctgggttccactgttgccacaggctttgattactctaagttcatgcttcttaggaaagtgcactttttacaccaacgctacacagttccctcagttgcctttactggacatcaaggagttcacatttttgacaaccattcagtcctggactgtccaaggggtggaggtagctccgtacaggaagctgcctgctgcgtgtggatcagtaatatcagacttgcccaacaactcactggagacatgaaaatcaatgcatggggttgcatgatatcacccaaatatttatgaaaacacttgtgtggccagagaccccagatatctaaaccaaagcatggggaatgcatgacatcacccaaatatttacgaacatgcttgtgctgccagagaccccagatcactttccctgcctcctgctaaataaatgggggtcgtagctttgcattggcttccacattacattactcataactgtggccttcctaatctctcatgtccctaagcacttattataatgtctcagcagctttcagcctctcaaaatattagtcatcatgaaaataaatgtctgatattaaaaaaaaaaaaaa

SEQ ID NO: 264 - skipped

SEQ ID NO: 265 - DNA, 107 bp, Homo sapiens
cggaccaacggacgcgctgaccgctgccaactgcagctcgcgctgcctcctgctcgcgccgtgccactaaggtcattcccgcctccgagagcccagagccgagatgg

SEQ ID NO: 266 - DNA, 876 bp, Homo sapiens
tgccagcggcggagtctccaactgggagagctgcagctgccgagaggaggagaacgctgaggtcggtcggaccaacggacgcgctgaccgctgccaactgcagctcgcgctgcctcctgctcgcgccgtgccactaaggtcattcccgcctccgagagcccagagccgagatggaaacggtccaggagctgatccccctggccaaggagatgatggcccagaagcgcaaggggaagatggtgaagctgtacgtgctgggcagcgtgctggccctcttcggcgtggtgctcggcctgatggagactgtgtgcagccccttcacggccgccagacgtctgcgggaccaggaggcagccgtggcggagctgcaggccgccctggagcgacaggctctccagaagcaagccctgcaggagaaaggcaagcagcaggacacggtcctcggcggccgggccctgtccaaccggcagcacgcctcctaggaactgtgggagaccagcggagtgggagggagacgcagtagacagagacagaccgagagaggaatggagagacagagggggcgcgcgcacaggagcctgactccgctgggagagtgcaggagcacgtgctgttttttatttggacttaacttcagagaaaccgctgacatctagaactgacctaccacaagcatccaccaaaggagtttgggattgagttttgctgctgtgcagcactgcattgtcatgacatttccaacactgtgtgaattatctaaatgcgtctaccattttgcactagggaggaaggataaatgctttttatgttattattattaattattacaatgaccaccattttgcattttgaaataaaaaaactttttataccata

SEQ ID NO: 267 - protein, 103 aa, Homo sapiens
METVQELIPLAKEMMAQKRKGKMVKLYVLGSVLALFGVVLGLMETVCSPFTAARRLRDQEAAVAELQAALERQALQKQALQEKGKQQDTVLGGRALSNRQHAS

SEQ ID NO: 268 - DNA, 106 bp, Homo sapiens
ggaattctcggctggagagcagaagaccgaaaggatggataaggtgggggatgccctggaggaagtgctcagcaaagccctgagtcagcgcacgatcactgtcggg

SEQ ID NO: 269 - DNA, 1352 bp, Homo sapiens
agtggctggtaggcagtggctgggaggcagcggcccaattagtgtcgtgcggcccgtggcgaggcgaggtccggggagcgagcgagcaagcaaggcgggaggggtggccggagctgcggcggctggcacaggaggaggagcccgggcgggcgaggggcggccggagagcgccagggcctgagctgccggagcggcgcctgtgagtgagtgcagaaagcaggcgcccgcgcgctagccgtggcaggagcagcccgcacgccgcgctctctccctgggcgacctgcagtttgcaatatgactttggaggaattctcggctggagagcagaagaccgaaaggatggataaggtgggggatgccctggaggaagtgctcagcaaagccctgagtcagcgcacgatcactgtcggggtgtacgaagcggccaagctgctcaacgtcgaccccgataacgtggtgttgtgcctgctggcggcggacgaggacgacgacagagatgtggctctgcagatccacttcaccctgatccaggcgttttgctgcgagaacgacatcaacatcctgcgcgtcagcaacccgggccggctggcggagctcctgctcttggagaccgacgctggccccgcggcgagcgagggcgccgagcagcccccggacctgcactgcgtgctggtgacgaatccacattcatctcaatggaaggatcctgccttaagtcaacttatttgtttttgccgggaaagtcgctacatggatcaatgggttccagtgattaatctccctgaacggtgatggcatctgaatgaaaataactgaaccaaattgcactgaagtttttgaaatacctttgtagttactcaagcagttactccctacactgatgcaaggattacagaaactgatgccaaggggctgagtgagttcaactacatgttctgggggcccggagatagatgactttgcagatggaaagaggtgaaaatgaagaaggaagctgtgttgaaacagaaaaataagtcaaaaggaacaaaaattacaaagaaccatgcaggaaggaaaactatgtattaatttagaatggttgagttacattaaaataaaccaaatatgttaaagtttaagtgtgcagccatagtttgggtatttttggtttatatgccctcaagtaaaagaaaagccgaaagggttaatcatatttgaaaaccatattttattgtattttgatgagatattaaattctcaaagttttattataaattctactaagttattttatgacatgaaaagttatttatgctataaattttttgaaacacaatacctacaataaactggtatgaataattgcatca

SEQ ID NO: 270 - protein, 165 aa, Homo sapiens
MTLEEFSAGEQKTERMDKVGDALEEVLSKALSQRTITVGVYEAAKLLNVDPDNVVLCLLAADEDDDRDVALQIHFTLIQAFCCENDINILRVSNPGRLAELLLLETDAGPAASEGAEQPPDLHCVLVTNPHSSQWKDPALSQLICFCRESRYMDQWVPVINLPER

SEQ ID NO: 271 - DNA, 108 bp, Homo sapiens
gcgcatcatccacggccgcgagttcgaccagaaggcgctgctggagttccgcgacaccatcttcgacaacatcctcaagggctcaagggttcttgttgatgcacgaga

SEQ ID NO: 272 - DNA, 4369 bp, Homo sapiens
ctcggagcgactgcagcggcggcggcggacgcggcctgaggcgagcggcggggcgtggggcggtgcctcggcccgggctcgccctcgccggcgggagcgtccatggcccccgggcgccggcggggcgcggccgcggcctgaggggccatgtccggggtggtgcggaccctcagccgctgcctgctgccggccgaggccggcggggcccgcgagcgcagggcgggcagcggcgcgcgcgacgcggagcgcgaggcccggaggcgtagccgcgacatcgacgcgctgctggcccgcgagcggcgcgcggtccggcgcctggtgaagatcctgctgctgggcgcgggcgagagcggcaagtccacgttcctcaagcagatgcgcatcatccacggccgcgagttcgaccagaaggcgctgctggagttccgcgacaccatcttcgacaacatcctcaagggctcaagggttcttgttgatgcacgagataagcttggcattccttggcagtattctgaaaatgagaagcatgggatgttcctgatggccttcgagaacaaggcggggctgcctgtggagccggccaccttccagctgtacgtcccggccctgagcgcactctggagggattctggcatcagggaggctttcagccggagaagcgagtttcagctgggggagtcggtgaagtacttcctggacaacttggaccggatcggccagctgaattactttcctagtaagcaagatatcctgctggctaggaaagccaccaagggaattgtggagcatgacttcgttattaagaagatcccctttaagatggtggatgtgggcggccagcggtcccagcgccagaagtggttccagtgcttcgacgggatcacgtccatcctgttcatggtctcctccagcgagtacgaccaggtcctcatggaggacaggcgcaccaaccggctggtggagtccatgaacatcttcgagaccatcgtcaacaacaagctcttcttcaacgtctccatcattctcttcctcaacaagatggacctcctggtggagaaggtgaagaccgtgagcatcaagaagcacttcccggacttcaggggcgacccgcacaggctggaggacgtccagcgctacctggtccagtgcttcgacaggaagagacggaaccgcagcaagccactcttccaccacttcaccaccgccatcgacaccgagaacgtccgcttcgtgttccatgctgtgaaagacaccatcctgcaggagaacctgaaggacatcatgctgcagtgagcgaggaagccccggggtttgtcgtcgttgagcagcccccacggctgtcggtcagactcttgggtgtgtgttgtctgtgtggtccttgagtgggtttctcggatccgtgccctggaatacctggctcaggaatgctgtcagaccagccagccagcgagctctaggcaaaaggacatggaaactgtcacgttagctactgaatcctgggggcgagtgaaactactgaaaatccgagtgatgatgttgtgaatacggaacacctaatcacacagcttgctttgcttttacagaaacgttcctctttttctgacgcagtttaattgaggaccgtgttgtgtgtgtatgtgtgtacacacgctctgtctttaatgacagaaacacaaaaaccagctggccttgcagacggcttttctaactcacaagtcttccctgagacagactaacctgaaagctttgcctaacagtagcttgtagagatccagtgcacgccgatgctgctaaactcagtgcctgagcccggccctgcagccccagccgcagtgtctgaaggccacctcccaaagggagcacgttgccttttcaaactcccgtgccgatttcctaagagcccctagtccaagcctctcagatgaagctgaggagccgtgcctaggatcccttcccagctctgaggacgggctgcagagctctgcaggtgtggattcaccttacgcccctacagcaggctcagcccttcccaccctgccccatgcccagcagcacaacacggagtgagacaggatgcccacggtgactgccgctccgtccgtgcacacacagcggtgctcttctccccttagccacccactgcccaacccaacggcaaagacacagaaaccaggtccccttgcagacggctctcccatcttcctgcaagtcatctgctcacacacagttggcagcacatagcgtttccttctttcagaaacattcctcttctggggcttcagaaagctggcaaggccactagcagagcttttgttaatgccccagctgcttggcgagctaacagctgacctttcgggaagcccacagacgctggaggaatcttgagtttctccaaactgccgctccaccagtgcctttggacagccgtgcctgttcgccgctctccctaagtctgattctcatcgaggcccctcgcttctatgactgtgcttgcagaagagtaaacactctcggatgccgctgtcctgggggagcccgcgggagcctgtgaatgttgatacgagctggccagtcctgggcccagctcacttgtccagctacctgccaggtggctttcactgtgtttaaaatacattgcattccaagctggtcccctctgtgtatcactctactgagaaatcctgcctagtgtgttttgggatgtgtcctagcatttacaagaaaatgaaaagcgtcctcttaattggcacccgaatgttgctgtggctcagtcacatatcccagggccctcgtcccgaggccgtgctgccccgagccccgagcccctctgcagctcacccttggcttgttttccgcaaacccggtaaacgcaagcccttggggcagatgcagaagcagaagagggaggggaaacctgcctctgggtcaccctgttagcacagcgttctcatcgggagacagcatggaactctctctcgcagtgctcgaggctgtgtgtcagtgtttgctgggcttgtggctccttttttggctggataaagaagtcgctgtttttgtactgcttctgtggctcttcacagacctcacggatgtgaccggagatgagtgccgatgaccacgttttaaaggagaaagagagctcctggtggggccctcggggtggtctcaggtcccatttgcagtctgcaacagtgacgcgcagcccggtccggagcgtggtgagctttgtttgccttctgggtcagctttcgctgtgtctcctgtgtgtgttagaatccagagcccagaggaagtgcaagcgggtcctccgccaacggggagagcctcttcgcggcgctgttggcgacagcagcgctgtgattcgcgtagcaggggagttgtttgaaacaccttcctgagtagtccggccttgtcaatgagtgcttgttttcctttaaacagtctgacatatttactcgtcactttcaaaccagaagcatgagaggaaggagatattgtggggtccgtttaactcgatagaaagcgcagggggatggcccccggcgcgggctcttgacccgctcagcgctgaccccaccgccctggccgaggcacttggccttgctgagctggacttcctcctcctcctcctcatgaccggggtgaattagaacgtttttaaagacacccccttccaaattctgtaacacattgtaattggagaagaaggaaactctgcaaggctaaactgtcattcacaacttggctacacatagactctagtcagttttgtctccagaaccttaggcttttgtattttttaattttaatttcactgttaatccttattgtcttttttattaagatgttggaaaagcaggaggtagttgtgcctcaattattgcaaaaatgtaacaataaagttcctcaaaataagatctgttcctcatagctatactgtgtacacataagacgcatatagggttttactgaaatctatttttaactcttatgttcgtagagaaattgtttcaaggattttgagtcataggtctgtaatttatagagatctctagaattcttattgtaattttcctacttctttgataaaagaaaaataagtcagattgttaactccaagattgaaaaaaaaaactcttgaaagaagattattagttgtaactaatttaggggttctgggcacagacatctaacctggtattgtaaggcagaggctcccattggaatggtagtggtccgggtcagttgttcatggtgtaagctttgcacagtgtattaacattgggagggtctggcttgaaaatttggccaccctcagcctctgaatgtttattaaaataaatttagtctttctttgcttaatataaaa

SEQ ID NO: 273 - protein, 381 aa, Homo sapiens
MSGVVRTLSRCLLPAEAGGARERRAGSGARDAEREARRRSRDIDALLARERRAVRRLVKILLLGAGESGKSTFLKQMRIIHGREFDQKALLEFRDTIFDNILKGSRVLVDARDKLGIPWQYSENEKHGMFLMAFENKAGLPVEPATFQLYVPALSALWRDSGIREAFSRRSEFQLGESVKYFLDNLDRIGQLNYFPSKQDILLARKATKGIVEHDFVIKKIPFKMVDVGGQRSQRQKWFQCFDGITSILFMVSSSEYDQVLMEDRRTNRLVESMNIFETIVNNKLFFNVSIILFLNKMDLLVEKVKTVSIKKHFPDFRGDPHRLEDVQRYLVQCFDRKRRNRSKPLFHHFTTAIDTENVRFVFHAVKDTILQENLKDIMLQ

SEQ ID NO: 274 - DNA, 106 bp, Homo sapiens
ccagaggacgaaaggccggagcggggaggctgagaagagactcctcctggtggacttcagcagccaagccctgttccaggacaagaattccagccaagtcctgggt

SEQ ID NO: 275 - DNA, 4393 bp, Homo sapiens
gcactagctgtctgccctgccctgccgtaggagatgggctgggagcctcccacgctctccagctcactcggcaggcagcggggaccagggctggcaggttaagcctctgggggtggatcctgaaaggtggtccagccgcctggccctgcgtgggaccctccacctggcagcagggtctcgctctgtcacacaggctggagtgcagtggtgtgatcttggctcatcgtaacctccacctcccgggttcaagtgattctcatgcctcagcctcccgagtagctgggattacaggtggtgacttccaagagtgactccgtcggaggaaaatgactccccagtcgctgctgcagacgacactgttcctgctgagtctgctcttcctggtccaaggtgcccacggcaggggccacagggaagactttcgcttctgcagccagcggaaccagacacacaggagcagcctccactacaaacccacaccagacctgcgcatctccatcgagaactccgaagaggccctcacagtccatgcccctttccctgcagcccaccctgcttcccgatccttccctgaccccaggggcctctaccacttctgcctctactggaaccgacatgctgggagattacatcttctctatggcaagcgtgacttcttgctgagtgacaaagcctctagcctcctctgcttccagcaccaggaggagagcctggctcagggccccccgctgttagccacttctgtcacctcctggtggagccctcagaacatcagcctgcccagtgccgccagcttcaccttctccttccacagtcctccccacacggccgctcacaatgcctcggtggacatgtgcgagctcaaaagggacctccagctgctcagccagttcctgaagcatccccagaaggcctcaaggaggccctcggctgcccccgccagccagcagttgcagagcctggagtcgaaactgacctctgtgagattcatgggggacatggtgtccttcgaggaggaccggatcaacgccacggtgtggaagctccagcccacagccggcctccaggacctgcacatccactcccggcaggaggaggagcagagcgagatcatggagtactcggtgctgctgcctcgaacactcttccagaggacgaaaggccggagcggggaggctgagaagagactcctcctggtggacttcagcagccaagccctgttccaggacaagaattccagccaagtcctgggtgagaaggtcttggggattgtggtacagaacaccaaagtagccaacctcacggagcccgtggtgctcactttccagcaccagctacagccgaagaatgtgactctgcaatgtgtgttctgggttgaagaccccacattgagcagcccggggcattggagcagtgctgggtgtgagaccgtcaggagagaaacccaaacatcctgcttctgcaaccacttgacctactttgcagtgctgatggtctcctcggtggaggtggacgccgtgcacaagcactacctgagcctcctctcctacgtgggctgtgtcgtctctgccctggcctgccttgtcaccattgccgcctacctctgctccagggtgcccctgccgtgcaggaggaaacctcgggactacaccatcaaggtgcacatgaacctgctgctggccgtcttcctgctggacacgagcttcctgctcagcgagccggtggccctgacaggctctgaggctggctgccgagccagtgccatcttcctgcacttctccctgctcacctgcctttcctggatgggcctcgaggggtacaacctctaccgactcgtggtggaggtctttggcacctatgtccctggctacctactcaagctgagcgccatgggctggggcttccccatctttctggtgacgctggtggccctggtggatgtggacaactatggccccatcatcttggctgtgcataggactccagagggcgtcatctacccttccatgtgctggatccgggactccctggtcagctacatcaccaacctgggcctcttcagcctggtgtttctgttcaacatggccatgctagccaccatggtggtgcagatcctgcggctgcgcccccacacccaaaagtggtcacatgtgctgacactgctgggcctcagcctggtccttggcctgccctgggccttgatcttcttctcctttgcttctggcaccttccagcttgtcgtcctctaccttttcagcatcatcacctccttccaaggcttcctcatcttcatctggtactggtccatgcggctgcaggcccggggtggcccctcccctctgaagagcaactcagacagcgccaggctccccatcagctcgggcagcacctcgtccagccgcatctaggcctccagcccacctgcccatgtgatgaagcagagattcggcctcgtcgcacactgcctgtggcccccgagcccggcccagccccaggccagtcagccgcagactttggaaagcccaacgaccatggagagatgggccgttgccatggtggacggactcccgggctgggcttttgaattggccttggggactactcggctctcactcagctcccacgggactcagaagtgcgccgccatgctgcctagggtactgtccccacatctgtcccaacccagctggaggcctggtctctccttacaacccctgggcccagccctcattgctgggggccaggccttggatcttgagggtctggcacatccttaatcctgtgcccctgcctgggacagaaatgtggctccagttgctctgtctctcgtggtcaccctgagggcactctgcatcctctgtcattttaacctcaggtggcacccagggcgaatggggcccagggcagaccttcagggccagagccctggcggaggagaggccctttgccaggagcacagcagcagctcgcctacctctgagcccaggccccctccctccctcagccccccagtcctccctccatcttccctggggttctcctcctctcccagggcctccttgctccttcgttcacagctgggggtccccgattccaatgctgttttttggggagtggtttccaggagctgcctggtgtctgctgtaaatgtttgtctactgcacaagcctcggcctgcccctgagccaggctcggtaccgatgcgtgggctgggctaggtccctctgtccatctgggcctttgtatgagctgcattgcccttgctcaccctgaccaagcacacgcctcagaggggccctcagcctctcctgaagccctcttgtggcaagaactgtggaccatgccagtcccgtctggtttccatcccaccactccaaggactgagactgacctcctctggtgacactggcctagggcctgacactctcctaagaggttctctccaagcccccaaatagctccaggcgccctcggccgcccatcatggttaattctgtccaacaaacacacacgggtagattgctggcctgttgtaggtggtagggacacagatgaccgacctggtcactcctcctgccaacattcagtctggtatgtgaggcgtgcgtgaagcaagaactcctggagctacagggacagggagccatcattcctgcctgggaatcctggaagacttcctgcaggagtcagcgttcaatcttgaccttgaagatgggaaggatgttctttttacgtaccaattcttttgtcttttgatattaaaaagaagtacatgttcattgtagagaatttggaaactgtagaagagaatcaagaagaaaaataaaaatcagctgttgtaatcacctagcaaactggcgtaagcattttgggtcatttccttctgagctttttcctgtgcttctattgaaagagtcactgatactaatacaaataccttggggccaatcaggaaacatgaaagagagaagagggctgtgtgtgaagaaaaaaaaaaaatcgactgctggaaacctcatcaaccagggcacaggggaagataaatggcaacttggtgtctgtgctggggaggcaatggggagtggtggggcctgtggcgaactggagactcccaaccccatgctgagagcgtggctgctcatcagctccagctggtcactaccttgcagggatgagggcccatgtagccagaccacctgccttttatgagaaatgggaaatccagactgtggtttgacatcccctgattttaaaattttggcgaatccaaaacattttctggccaaagagattacagtcaaaagctgcctggtcctgggatttatgcaaccagtttactgatcactctgcagcaggtgggctgcaagaattaaatcactggacttctctccca

SEQ ID NO: 276 - protein, 693 aa, Homo sapiens
MTPQSLLQTTLFLLSLLFLVQGAHGRGHREDFRFCSQRNQTHRSSLHYKPTPDLRISIENSEEALTVHAPFPAAHPASRSFPDPRGLYHFCLYWNRHAGRLHLLYGKRDFLLSDKASSLLCFQHQEESLAQGPPLLATSVTSWWSPQNISLPSAASFTFSFHSPPHTAAHNASVDMCELKRDLQLLSQFLKHPQKASRRPSAAPASQQLQSLESKLTSVRFMGDMVSFEEDRINATVWKLQPTAGLQDLHIHSRQEEEQSEIMEYSVLLPRTLFQRTKGRSGEAEKRLLLVDFSSQALFQDKNSSQVLGEKVLGIVVQNTKVANLTEPVVLTFQHQLQPKNVTLQCVFWVEDPTLSSPGHWSSAGCETVRRETQTSCFCNHLTYFAVLMVSSVEVDAVHKHYLSLLSYVGCVVSALACLVTIAAYLCSRVPLPCRRKPRDYTIKVHMNLLLAVFLLDTSFLLSEPVALTGSEAGCRASAIFLHFSLLTCLSWMGLEGYNLYRLVVEVFGTYVPGYLLKLSAMGWGFPIFLVTLVALVDVDNYGPIILAVHRTPEGVIYPSMCWIRDSLVSYITNLGLFSLVFLFNMAMLATMVVQILRLRPHTQKWSHVLTLLGLSLVLGLPWALIFFSFASGTFQLVVLYLFSIITSFQGFLIFIWYWSMRLQARGGPSPLKSNSDSARLPISSGSTSSSRI

SEQ ID NO: 277 - DNA, 103 bp, Homo sapiens
cccagaaagcccagcagttggaggaggccagactacaggaggaagagcagaaaaaagaggagctggccaggctacggagagaactggtgcataaggcaaatcc

SEQ ID NO: 278 - DNA, 3473 bp, Homo sapiens
gaatgagtcccgcggcgggttggctcgcgcttcgttgtcagatctgaggcgaggctaggtgagccgtgggaagaaaagagggagcagctagggcgcgggtctccctcctcccggagtttggaacggctgaagttcaccttccagcccctagcgccgttcgcgccgctaggcctggcttctgaggcggttgcggtgctcggtcgccgcctaggcggggcagggtgcgagcaggggcttcgggccacgcttctcttggcgacaggattttgctgtgaagtccgtccgggaaacggaggaaaaaaagagttgcgggaggctgtcggctaataacggttcttgatacatatttgccagacttcaagatttcagaaaaggggtgaaagagaagattgcaactttgagtcagacctgtaggcctgatagactgattaaaccacagaaggtgacctgctgagaaaagtggtacaaatactgggaaaaacctgctcttctgcgttaagtgggagacaatgtcacaagttaaaagctcttattcctatgatgccccctcggatttcatcaatttttcatccttggatgatgaaggagatactcaaaacatagattcatggtttgaggagaaggccaatttggagaataagttactggggaagaatggaactggagggctttttcagggcaaaactcctttgagaaaggctaatcttcagcaagctattgtcacacctttgaaaccagttgacaacacttactacaaagaggcagaaaaagaaaatcttgtggaacaatccattccgtcaaatgcttgttcttccctggaagttgaggcagccatatcaagaaaaactccagcccagcctcagagaagatctcttaggctttctgctcagaaggatttggaacagaaagaaaagcatcatgtaaaaatgaaagccaagagatgtgccactcctgtaatcatcgatgaaattctaccctctaagaaaatgaaagtttctaacaacaaaaagaagccagaggaagaaggcagtgctcatcaagatactgctgaaaagaatgcatcttccccagagaaagccaagggtagacatactgtgccttgtatgccacctgcaaagcagaagtttctaaaaagtactgaggagcaagagctggagaagagtatgaaaatgcagcaagaggtggtggagatgcggaaaaagaatgaagaattcaagaaacttgctctggctggaatagggcaacctgtgaagaaatcagtgagccaggtcaccaaatcagttgacttccacttccgcacagatgagcgaatcaaacaacatcctaagaaccaggaggaatataaggaagtgaactttacatctgaactacgaaagcatccttcatctcctgcccgagtgactaagggatgtaccattgttaagcctttcaacctgtcccaaggaaagaaaagaacatttgatgaaacagtttctacatatgtgccccttgcacagcaagttgaagacttccataaacgaacccctaacagatatcatttgaggagcaagaaggatgatattaacctgttaccctccaaatcttctgtgaccaagatttgcagagacccacagactcctgtactgcaaaccaaacaccgtgcacgggctgtgacctgcaaaagtacagcagagctggaggctgaggagctcgagaaattgcaacaatacaaattcaaagcacgtgaacttgatcccagaatacttgaaggtgggcccatcttgcccaagaaaccacctgtgaaaccacccaccgagcctattggctttgatttggaaattgagaaaagaatccaggagcgagaatcaaagaagaaaacagaggatgaacactttgaatttcattccagaccttgccctactaagattttggaagatgttgtgggtgttcctgaaaagaaggtacttccaatcaccgtccccaagtcaccagcctttgcattgaagaacagaattcgaatgcccaccaaagaagatgaggaagaggacgaaccggtagtgataaaagctcaacctgtgccacattatggggtgccttttaagccccaaatcccagaggcaagaactgtggaaatatgccctttctcgtttgattctcgagacaaagaacgtcagttacagaaggagaagaaaataaaagaactgcagaaaggggaggtgcccaagttcaaggcacttcccttgcctcattttgacaccattaacctgccagagaagaaggtaaagaatgtgacccagattgaacctttctgcttggagactgacagaagaggtgctctgaaggcacagacttggaagcaccagctggaagaagaactgagacagcagaaagaagcagcttgtttcaaggctcgtccaaacaccgtcatctctcaggagccctttgttcccaagaaagagaagaaatcagttgctgagggcctttctggttctctagttcaggaaccttttcagctggctactgagaagagagccaaagagcggcaggagctggagaagagaatggctgaggtagaagcccagaaagcccagcagttggaggaggccagactacaggaggaagagcagaaaaaagaggagctggccaggctacggagagaactggtgcataaggcaaatccaatacgcaagtaccagggtctggagataaagtcaagtgaccagcctctgactgtgcctgtatctcccaaattctccactcgattccactgctaaactcagctgtgagctgcggataccgcccggcaatgggacctgctcttaacctcaaacctaggaccgtcttgctttgtcattgggcatggagagaacccatttctccagacttttacctacccgtgcctgagaaagcatacttgacaactgtggactccagttttgttgagaattgttttcttacattactaaggctaataatgagatgtaactcatgaatgtctcgattagactccatgtagttacttcctttaaaccatcagccggccttttatatgggtcttcactctgactagaatttagtctctgtgtcagcacagtgtaatctctattgctattgccccttacgactctcaccctctccccactttttttaaaaattttaaccagaaaataaagatagttaaatcctaagatagagattaagtcatggtttaaatgaggaacaatcagtaaatcagattctgtcctcttctctgcataccgtgaatttatagttaaggatccctttgctgtgagggtagaaaacctcaccaactgcaccagtgaggaagaagactgcgtggattcatggggagcctcacagcagccacgcagcaggctctgggtggggctgccgttaaggcacgttctttccttactggtgctgataacaacagggaaccgtgcagtgtgcattttaagacctggcctggaataaatacgttttgtctttccctc

SEQ ID NO: 279 - protein, 747 aa, Homo sapiens
MSQVKSSYSYDAPSDFINFSSLDDEGDTQNIDSWFEEKANLENKLLGKNGTGGLFQGKTPLRKANLQQAIVTPLKPVDNTYYKEAEKENLVEQSIPSNACSSLEVEAAISRKTPAQPQRRSLRLSAQKDLEQKEKHHVKMKAKRCATPVIIDEILPSKKMKVSNNKKKPEEEGSAHQDTAEKNASSPEKAKGRHTVPCMPPAKQKFLKSTEEQELEKSMKMQQEVVEMRKKNEEFKKLALAGIGQPVKKSVSQVTKSVDFHFRTDERIKQHPKNQEEYKEVNFTSELRKHPSSPARVTKGCTIVKPFNLSQGKKRTFDETVSTYVPLAQQVEDFHKRTPNRYHLRSKKDDINLLPSKSSVTKICRDPQTPVLQTKHRARAVTCKSTAELEAEELEKLQQYKFKARELDPRILEGGPILPKKPPVKPPTEPIGFDLEIEKRIQERESKKKTEDEHFEFHSRPCPTKILEDVVGVPEKKVLPITVPKSPAFALKNRIRMPTKEDEEEDEPVVIKAQPVPHYGVPFKPQIPEARTVEICPFSFDSRDKERQLQKEKKIKELQKGEVPKFKALPLPHFDTINLPEKKVKNVTQIEPFCLETDRRGALKAQTWKHQLEEELRQQKEAACFKARPNTVISQEPFVPKKEKKSVAEGLSGSLVQEPFQLATEKRAKERQELEKRMAEVEAQKAQQLEEARLQEEEQKKEELARLRRELVHKANPIRKYQGLEIKSSDQPLTVPVSPKFSTRFHC

SEQ ID NO: 280 - DNA, 108 bp, Homo sapiens
gtggtatcggcgtctgctgcgagagtcgggctccaccatggacataccggttccctccagcttcaacgacgttggccaggactggcggctgcggcattttgtagacca

SEQ ID NO: 281 - DNA, 1989 bp, Homo sapiens
agaggagcggaaagcatggtccggggggcggcggacgcctggtaggcgctcgggccgttgttgtggggctgcgcgctggcgctgcagggcgggatgctgtacccaagagagaggccgtcgcgggagcggaagaagctggaccgcctctggagcttccgcgccgacttcttcgacaaactgtgccttggcttctaggagtagtggtatcggcgtctgctgcgagagtcgggctccaccatggacataccggttccctccagcttcaacgacgttggccaggactggcggctgcggcattttgtagaccagatgtggtacgaacgggaggtgaccttcctggagcaatggacccaggacctgcacacaagagtggtactgaggattgtcagtgcccactcctatgccatcgtgtgggtgaatggggtcgacgcgctagagcatgagggatctacctcccctttgacaccgacatcagtagcctgttccaggtggggcccctgccctcccgcctccgcatcactatcaccatcggcaacatgctcatctcctccaccctgccaccagggagcatcctcgacatggccgacacctccacgtgggtaccatcctgcttccaccgcagacacccaccttcctgtcccaccccgtggggcattacattagggtaattacattaggtaagtcacatatcagtgacttacaaattttgtaagtaattaagaaattttcaataagtgtggagctgaatatttacatgagcccttcaaaaactgatagttaatggaataaatgaaaataacaggagagactttgttgaaagaagacaaaatagtcaaggaagtgatagaggatacaaaagaaagatgaaaacttacattcatttaatgtctaaccgtgtgccaaaagacaatattattatttagttttcataaccacaacatttggtggatatgattgcttccattatataggttaggaaagtaaagcttaggggtttgtgaacccactagtttaaagttgtgtagccaataggtggttgagtgagaattcaaaactggaacagatttgcttgatccagaatggtataactttattgtccatgcattgtcttctacattttactgcctgtaaagtgggagtcagttatgggaggagacccagaatgtcacaggttttgaaagctgctgtggaaaatttggaaggaggcattggatttaatgactgatacaggtcagtgcagattgaccttggagagaacagttttcttcagtggcatggtagtgttcaaaacaggatctgatggtaaagaaaatgtagaaccagtgtgtgtagactccttgatggaaaagtttatttgtaaaatatcagaggaaaattataatatagatttgtccattcaaaccccaaagtccagattcttactgcaatatttgatgtagccaatatacagcagttgagttcaattttggcccctgtttatgtgtatgctaaagaaaaataacaatcctaagcctatgccacttaaacaagaggatgtgattatactatgaaacacttgtgaccataggaatatagcagtgctaaggcaaaataggtcttaacttgacttttcctgtcatttgctgccattgtttgccaaaggtctagcacctatcttcagaggaaagtcaagaaattagtgctcagatggtgggatgaattcctgaattattgttggctctagtagtttcttcagatcaattttatagtttctttagaactagaaaattaggtctcagaatggcagttggccacccaatgtgtataatacaattactcaaccagctgcttgaaagcaaggggcaacagagaagtcagctactggctcaggcaacaggaaatttgatgatactccttggtcaaatccttcatttaacatacatttatatagaacctttctgtatcaggcaccattctaggtaccacagataaaacaataaagagaactga

SEQ ID NO: 282 - skipped

SEQ ID NO: 283 - DNA, 107 bp, Homo sapiens
gtgcgaatctgacttacgccattattacgacagtaccattgagttgtgcgtgggggacccagagattaaaaagacttcctttaagggggactctggaggccctcttg

SEQ ID NO: 284 - DNA, 891 bp, Homo sapiens
agctccaaccagggcagccttcctgagaagatgcaaccaatcctgcttctgctggccttcctcctgctgcccagggcagatgcaggggagatcatcgggggacatgaggccaagccccactcccgcccctacatggcttatcttatgatctgggatcagaagtctctgaagaggtgcggtggcttcctgatacgagacgacttcgtgctgacagctgctcactgttggggaagctccataaatgtcaccttgggggcccacaatatcaaagaacaggagccgacccagcagtttatccctgtgaaaagacccatcccccatccagcctataatcctaagaacttctccaacgacatcatgctactgcagctggagagaaaggccaagcggaccagagctgtgcagcccctcaggctacctagcaacaaggcccaggtgaagccagggcagacatgcagtgtggccggctgggggcagacggcccccctgggaaaacactcacacacactacaagaggtgaagatgacagtgcaggaagatcgaaagtgcgaatctgacttacgccattattacgacagtaccattgagttgtgcgtgggggacccagagattaaaaagacttcctttaagggggactctggaggccctcttgtgtgtaacaaggtggcccagggcattgtctcctatggacgaaacaatggcatgcctccacgagcctgcaccaaagtctcaagctttgtacactggataaagaaaaccatgaaacgctactaactacaggaagcaaactaagcccccgctgtaatgaaacaccttctctggagccaagtccagatttacactgggagaggtgccagcaactgaataaatacctcttagctgagtggaaaa

SEQ ID NO: 285 - protein, 247 aa, Homo sapiens
MQPILLLLAFLLLPRADAGEIIGGHEAKPHSRPYMAYLMIWDQKSLKRCGGFLIRDDFVLTAAHCWGSSINVTLGAHNIKEQEPTQQFIPVKRPIPHPAYNPKNFSNDIMLLQLERKAKRTRAVQPLRLPSNKAQVKPGQTCSVAGWGQTAPLGKHSHTLQEVKMTVQEDRKCESDLRHYYDSTIELCVGDPEIKKTSFKGDSGGPLVCNKVAQGIVSYGRNNGMPPRACTKVSSFVHWIKKTMKRY

SEQ ID NO: 286 - DNA, 106 bp, Homo sapiens
gagaagagtcggaagaggtgtggcggcatcctagtgagaaaggactttgtgctgacagctgctcactgccagggaagctccataaatgtcaccttgggggcccaca

SEQ ID NO: 287 - DNA, 936 bp, Homo sapiens
atctccctccagcatttgtttctggaaggagtcaacaccaacagctctgacctgggcagccttcctgagaaaatgcagccattcctcctcctgttggcctttcttctgacccctggggctgggacagaggagatcatcgggggccatgaggccaagccccactcccgcccctacatggcctttgttcagtttctgcaagagaagagtcggaagaggtgtggcggcatcctagtgagaaaggactttgtgctgacagctgctcactgccagggaagctccataaatgtcaccttgggggcccacaatatcaaggaacaggagcggacccagcagtttatccctgtgaaaagacccatcccccatccagcctataatcctaagaacttctccaacgacatcatgctactgcagctggagagaaaggccaagtggaccacagctgtgcggcctctcaggctacctagcagcaaggcccaggtgaagccagggcagctgtgcagtgtggctggctggggttatgtctcaatgagcactttagcaaccacactgcaggaagtgttgctgacagtgcagaaggactgccagtgtgaacgtctcttccatggcaattacagcagagccactgagatttgtgtgggggatccaaagaagacacagaccggtttcaagggggactccggggggcccctcgtgtgtaaggacgtagcccaaggtattctctcctatggaaacaaaaaagggacacctccaggagtctacatcaaggtctcacacttcctgccctggataaagagaacaatgaagcgcctctaacagcaggcatgagactaaccttcctctgggcctgaccatctctgggacagaggcaagaatccccaaggggtgggcagtcggggttgcaggactgtaataaatggatctctggtgtaaatatga

SEQ ID NO: 288 - protein, 246 aa, Homo sapiens
MQPFLLLLAFLLTPGAGTEEIIGGHEAKPHSRPYMAFVQFLQEKSRKRCGGILVRKDFVLTAAHCQGSSINVTLGAHNIKEQERTQQFIPVKRPIPHPAYNPKNFSNDIMLLQLERKAKWTTAVRPLRLPSSKAQVKPGQLCSVAGWGYVSMSTLATTLQEVLLTVQKDCQCERLFHGNYSRATEICVGDPKKTQTGFKGDSGGPLVCKDVAQGILSYGNKKGTPPGVYIKVSHFLPWIKRTMKRL

SEQ ID NO: 289 - DNA, 99 bp, Homo sapiens
gagaactacttagaaaaagaaaagctgaagtgcatgaaaaggaaacatcacaatggctatttggagaacagaaaaaacgcaagcagcagagaacaggaa

SEQ ID NO: 290 - DNA, 2084 bp, Homo sapiens
agtcagaccaaaatagcaggaaggtattgcagcaagatggatttgggaaaggaccaatctcatttgaagcaccatcagacacctgaccctcatcaagaagagaaccattctccagaagtcattggaacctggagtttgagaaacagagaactacttagaaaaagaaaagctgaagtgcatgaaaaggaaacatcacaatggctatttggagaacagaaaaaacgcaagcagcagagaacaggaaaaggaaatcgaagaggcagaaagagacaacaaaacacagaattgaaggtggagcctcagccacagatagaaaaggaaatagtggagaaagcactggcacctatagagaaaaaaactgagccacctgggagcataaccaaagtatttccttcagtagcctccccgcaaaaagttgtgcctgaggaacacttttctgaaatatgtcaagaaagtaacatatatcaggagaatttttctgagtaccaagaaatagcagtacaaaaccattcttctgaaacatgccaacatgtgtctgaacctgaagacctctctcctaaaatgtaccaagaaatatctgtacttcaagacaattcttccaaaatatgccaagacatgaaggaacctgaagacaactctcctaacacatgccaagtaatatctgtaattcaagaccatcctttcaaaatgtaccaagatatggctaaacgagaagatctggctcctaaaatgtgccaagaagctgctgtacccaaaatccttccttgtccaacatctgaagacacagctgatctggcaggatgctctcttcaagcatatccaaaaccagatgtgcctaaaggctatattcttgacacagaccaaaatccagcagaaccagaggaatacaatgaaacagatcaaggaatagctgagacagaaggcctttttcctaaaatacaagaaatagctgagcctaaagacctttctacaaaaacacaccaagaatcagctgaacctaaataccttcctcataaaacatgtaacgaaattattgtgcctaaagccccctctcataaaacaatccaagaaacacctcattctgaagactattcaattgaaataaaccaagaaactcctgggtctgaaaaatattcacctgaaacgtatcaagaaatacctgggcttgaagaatattcacctgaaatataccaagaaacatcccagcttgaagaatattcacctgaaatataccaagaaacaccggggcctgaagacctctctactgagacatataaaaataaggatgtgcctaaagaatgctttccagaaccacaccaagaaacaggtgggccccaaggccaggatcctaaagcacaccaggaagatgctaaagatgcttatacttttcctcaagaaatgaaagaaaaacccaaagaagagccaggaataccagcaattctgaatgagagtcatccagaaaatgatgtctatagttatgttttgttttaacaatgctcaaccataaagttgtggtccaatggaacatacagcttaatagtttatgcgtgattttctcaaaatattgtaaaacttttgacaatgctcattaatattattttttctatttgtagaccatatctgaaagaaataacattttttaaggctctaccacatagacaatatcatgctagaatgtgtgtgtgtgtgtgtgtgtgtgtgtgtgtatgtatgtataggtcggggagaggatagtggtgggaacagacaaataaggaagcggggaggactggataattggttttcccccctaagaacatttatttacgtcttaagagcagataagtgactaagactgaacacatacattttgtggagtatatagttttcttgtaaatgctgttcaattattaatgtaacagtagcatcaaaattttattcaggctttagttgactcttttggtcagttttaacaattctccttaaaagatattttggagtgatgaatgtagtttacttttgtatttgaattttgattttctatttttattttttaaatattgtatttgtgcacaatgtacattaaatcattattacatgcttaa

SEQ ID NO: 291 - protein, 484 aa, Homo sapiens
MDLGKDQSHLKHHQTPDPHQEENHSPEVIGTWSLRNRELLRKRKAEVHEKETSQWLFGEQKKRKQQRTGKGNRRGRKRQQNTELKVEPQPQIEKEIVEKALAPIEKKTEPPGSITKVFPSVASPQKVVPEEHFSEICQESNIYQENFSEYQEIAVQNHSSETCQHVSEPEDLSPKMYQEISVLQDNSSKICQDMKEPEDNSPNTCQVISVIQDHPFKMYQDMAKREDLAPKMCQEAAVPKILPCPTSEDTADLAGCSLQAYPKPDVPKGYILDTDQNPAEPEEYNETDQGIAETEGLFPKIQEIAEPKDLSTKTHQESAEPKYLPHKTCNEIIVPKAPSHKTIQETPHSEDYSIEINQETPGSEKYSPETYQEIPGLEEYSPEIYQETSQLEEYSPEIYQETPGPEDLSTETYKNKDVPKECFPEPHQETGGPQGQDPKAHQEDAKDAYTFPQEMKEKPKEEPGIPAILNESHPENDVYSYVLF

SEQ ID NO: 292 - DNA, 108 bp, Homo sapiens
cagggcggtgttctgcccaacatccaggctgtactgctccccaagaagactgagagtcaccacaaggccaaggcaggttttagaagttcgcaatggctcgtaccaagc

SEQ ID NO: 293 - DNA, 921 bp, Homo sapiens
acttttacatttttgtcttcattgcttaacatcgtttttaagaattcaaaatgtccggacgcggcaagcaaggcggaaaggcccgagctaaggctaagacccgctcttcgcgggccggactccagttccctgtgggccgcgtacaccgcttgctccgcaagggcaactactccgagcgagtcggggccggcgcgccagtgtatctggcggcggtgttggagtacctgaccgccgagatcctggagctggcgggcaacgccgcccgcgacaacaagaagacccgcatcatcccccgacacctgcagctggccatccgcaacgacgaggagctaaacaagttgctgggtaaagtcacaattgctcagggcggtgttctgcccaacatccaggctgtactgctccccaagaagactgagagtcaccacaaggccaaggcagggtttagaagttcgcaatggctcgtaccaagcagactgctcgcaagtccacgggtgggaaagcgccacgcaagcagctggccaccaaggctgctcgaaagagcgctccagccaccggcggcgtgaagaagccccaccgttaccggcccggcacggtggctctgcgcgagatccgccgctaccagaagtcgaccgagctgctgattcgcaaactgccattccagcgtctagtccgtgagatcgcgcaggacttcaagactgatctgcgttttcagagctcggcggtgatggcgctgcaggaggcctgcgaggcctacctggtggggctgtttgaggacaccaacctatgcgccattcacgccaagcgagtgactatcatgcccaaggacatccagcttgctcgccgcattcgtggggagagggcgtaaattgtcttgtgaatgtgtgctaaccaaaacccaaaggctcttttcagagccaacca

SEQ ID NO: 294 - protein, 136 aa, Homo sapiens
MARTKQTARKSTGGKAPRKQLATKAARKSAPATGGVKKPHRYRPGTVALREIRRYQKSTELLIRKLPFQRLVREIAQDFKTDLRFQSSAVMALQEACEAYLVGLFEDTNLCAIHAKRVTIMPKDIQLARRIRGERA

SEQ ID NO: 295 - DNA, 108 bp, Homo sapiens
gctgtgggccagggggccttgggcgtggaagtgcgagccaaggaccaggacatcttggatctggtgggtgtgctgcacgatcccgagactctgcttcgctgcatcgct

SEQ ID NO: 296 - DNA, 1505 bp, Homo sapiens
aagtgacgcgaggctctgcggagaccaggagtcagactgtaggacgacctcgggtcccacgtgtccccggtactcgccggccggagcccccggcttcccggggccgggggaccttagcggcacccacacacagcctactttccaagcggagccatgtctggtaacggcaatgcggctgcaacggcggaagaaaacagcccaaagatgagagtgattcgcgtgggtacccgcaagagccagcttgctcgcatacagacggacagtgtggtggcaacattgaaagcctcgtaccctggcctgcagtttgaaatcattgctatgtccaccacaggggacaagattcttgatactgcactctctaagattggagagaaaagcctgtttaccaaggagcttgaacatgccctggagaagaatgaagtggacctggttgttcactccttgaaggacctgcccactgtgcttcctcctggcttcaccatcggagccatctgcaagcgggaaaaccctcatgatgctgttgtctttcacccaaaatttgttgggaagaccctagaaaccctgccagagaagagtgtggtgggaaccagctccctgcgaagagcagcccagctgcagagaaagttcccgcatctggagttcaggagtattcggggaaacctcaacacccggcttcggaagctggacgagcagcaggagttcagtgccatcatcctggcaacagctggcctgcagcgcatgggctggcacaaccgggtggggcagatcctgcaccctgaggaatgcatgtatgctgtgggccagggggccttgggcgtggaagtgcgagccaaggaccaggacatcttggatctggtgggtgtgctgcacgatcccgagactctgcttcgctgcatcgctgaaagggccttcctgaggcacctggaaggaggctgcagtgtgccagtagccgtgcatacagctatgaaggatgggcaactgtacctgactggaggagtctggagtctagacggctcagatagcatacaagagaccatgcaggctaccatccatgtccctgcccagcatgaagatggccctgaggatgacccacagttggtaggcatcactgctcgtaacattccacgagggccccagttggctgcccagaacttgggcatcagcctggccaacttgttgctgagcaaaggagccaaaaacatcctggatgttgcacggcagcttaacgatgcccattaactggtttgtggggcacagatgcctgggttgctgctgtccagtgcctacatcccgggcctcagtgccccattctcactgctatctggggagtgattaccccgggagactgaactgcagggttcaagccttccagggatttgcctcaccttggggccttgatgactgccttgcctcctcagtatgtgggggcttcatctctttagagaagtccaagcaacagcctttgaatgtaaccaatcctactaataaaccagttctgaaggtgt

SEQ ID NO: 297 - protein, 361 aa, Homo sapiens [sequence omitted]

SEQ ID NO: 298 - DNA, 101 bp, Homo sapiens
aacttcctgaatgtgaagcagatgacggctgcccgaagccccccgagattgcacatggctatgtggagcactcggttcgctaccagtgtaagaactactac

SEQ ID NO: 299 - DNA, 1534 bp, Homo sapiens
actggaaaagatagtgaccttaccagggccaaagtttgtagacacaggaattacgaaatggagaagggggagaagtgagctagtggcagcataaaaagaccagcagatgccccacagcactgctcttccagaggcaagaccaaccaagatgagtgccctgggagctgtcattgccctcctgctctggggacagctttttgcagtggactcaggcaatgatgtcacggatatcgcagatgacggctgcccgaagccccccgagattgcacatggctatgtggagcactcggttcgctaccagtgtaagaactactacaaactgcgcacagaaggagatggagtatacaccttaaatgataagaagcagtggataaataaggctgttggagataaacttcctgaatgtgaagcagatgacggctgcccgaagccccccgagattgcacatggctatgtggagcactcggttcgctaccagtgtaagaactactacaaactgcgcacagaaggagatggagtgtacaccttaaacaatgagaagcagtggataaataaggctgttggagataaacttcctgaatgtgaagcagtatgtgggaagcccaagaatccggcaaacccagtgcagcggatcctgggtggacacctggatgccaaaggcagctttccctggcaggctaagatggtttcccaccataatctcaccacaggtgccacgctgatcaatgaacaatggctgctgaccacggctaaaaatctcttcctgaaccattcagaaaatgcaacagcgaaagacattgcccctactttaacactctatgtggggaaaaagcagcttgtagagattgagaaggttgttctacaccctaactactcccaggtagatattgggctcatcaaactcaaacagaaggtgtctgttaatgagagagtgatgcccatctgcctaccttcaaaggattatgcagaagtagggcgtgtgggttatgtttctggctgggggcgaaatgccaattttaaatttactgaccatctgaagtatgtcatgctgcctgtggctgaccaagaccaatgcataaggcattatgaaggcagcacagtccccgaaaagaagacaccgaagagccctgtaggggtgcagcccatactgaatgaacacaccttctgtgctggcatgtctaagtaccaagaagacacctgctatggcgatgcgggcagtgcctttgccgttcacgacctggaggaggacacctggtatgcgactgggatcttaagctttgataagagctgtgctgtggctgagtatggtgtgtatgtgaaggtgacttccatccaggactgggttcagaagaccatagctgagaactaatgcaaggctggccggaagcccttgcctgaaagcaagatttcagcctggaagagggcaaagtggacgggagtggacaggagtggatgcgataagatgtggtttgaagctgatgggtgccagccctgcattgctgagtcaatcaataaagagctttcttttgaccca

SEQ ID NO: 300 - protein, 406 aa, Homo sapiens
MSALGAVIALLLWGQLFAVDSGNDVTDIADDGCPKPPEIAHGYVEHSVRYQCKNYYKLRTEGDGVYTLNDKKQWINKAVGDKLPECEADDGCPKPPEIAHGYVEHSVRYQCKNYYKLRTEGDGVYTLNNEKQWINKAVGDKLPECEAVCGKPKNPANPVQRILGGHLDAKGSFPWQAKMVSHHNLTTGATLINEQWLLTTAKNLFLNHSENATAKDIAPTLTLYVGKKQLVEIEKVVLHPNYSQVDIGLIKLKQKVSVNERVMPICLPSKDYAEVGRVGYVSGWGRNANFKFTDHLKYVMLPVADQDQCIRHYEGSTVPEKKTPKSPVGVQPILNEHTFCAGMSKYQEDTCYGDAGSAFAVHDLEEDTWYATGILSFDKSCAVAEYGVYVKVTSIQDWVQKTIAEN

SEQ ID NO: 301 - DNA, 108 bp, Homo sapiens
caaggctgaggatgaggcccagagggacagagtggctgccaaaaactcgctggaggcccatgtcttccatgtgaaaggttctttgcaagaggaaagccttagggacaa

SEQ ID NO: 302 - DNA, 2355 bp, Homo sapiens
agatccgagccgggctggctgcagagaaaccgcagggagagcctcactgctgagcgcccctcgacggcggagcggcagcagcctccgtggcctccagcatccgacaagaagcttcagccatgcaggccccacgggagctcgcggtgggcatcgacctgggcaccacctactcgtgcgtgggcgtgtttcagcagggccgcgtggagatcctggccaacgaccagggcaaccgcaccacgcccagctacgtggccttcaccgacaccgagcggctggtcggggacgcggccaagagccaggcggccctgaacccccacaacaccgtgttcgatgccaagcggctgatcgggcgcaagttcgcggacaccacggtgcagtcggacatgaagcactggcccttccgggtggtgagcgagggcggcaagcccaaggtgcgcgtatgctaccgcggggaggacaagacgttctaccccgaggagatctcgtccatggtgctgagcaagatgaaggagacggccgaggcgtacctgggccagcccgtgaagcacgcagtgatcaccgtgcccgcctatttcaatgactcgcagcgccaggccaccaaggacgcgggggccatcgcggggctcaacgtgttgcggatcatcaatgagcccacggcagctgccatcgcctatgggctggaccggcggggcgcgggagagcgcaacgtgctcatttttgacctgggtgggggcaccttcgatgtgtcggttctctccattgacgctggtgtctttgaggtgaaagccactgctggagatacccacctgggaggagaggacttcgacaaccggctcgtgaaccacttcatggaagaattccggcggaagcatgggaaggacctgagcgggaacaagcgtgccctgcgcaggctgcgcacagcctgtgagcgcgccaagcgcaccctgtcctccagcacccaggccaccctggagatagactccctgttcgagggcgtggacttctacacgtccatcactcgtgcccgctttgaggaactgtgctcagacctcttccgcagcaccctggagccggtggagaaggccctgcgggatgccaagctggacaaggcccagattcatgacgtcgtcctggtggggggctccacacgcatccccaaggtgcagaagttgctgcaggacttcttcaacggcaaggagctgaacaagagcatcaaccctgatgaggctgtggcctatggggctgctgtgcaggcggccgtgttgatgggggacaaatgtgagaaagtgcaggatctcctgctgctggatgtggctcccctgtctctggggctggagacagcaggtggggtgatgaccacgctgatccagaggaacgccactatccccaccaagcagacccagactttcaccacctactcggacaaccagcctggggtcttcatccaggtgtatgagggtgagagggccatgaccaaggacaacaacctgctggggcgttttgaactcagtggcatccctcctgccccacgtggagtcccccagatagaggtgacttttgacattgatgctaatggcatcctgagcgtgacagccactgacaggagcacaggtaaggctaacaagatcaccatcaccaatgacaagggccggctgagcaaggaggaggtggagaggatggttcatgaagccgagcagtacaaggctgaggatgaggcccagagggacagagtggctgccaaaaactcgctggaggcccatgtcttccatgtgaaaggttctttgcaagaggaaagccttagggacaagattcccgaagaggacaggcgcaaaatgcaagacaagtgtcgggaagtccttgcctggctggagcacaaccagctggcagagaaggaggagtatgagcatcagaagagggagctggagcaaatctgtcgccccatcttctccaggctctatggggggcctggtgtccctgggggcagcagttgtggcactcaagcccgccagggggaccccagcaccggccccatcattgaggaggttgattgaatggcccttcgtgataagtcagctgtgactgtcagggctatgctatgggccttctagactgtcttctatgatcctgcccttcagagatgaactttccctccaaagctagaactttcttcccaggataactgaagtcttttgactttttgcggggagggcggttcatcctcttctgcttcaaataaaaagtcattaatttattaaaacttgtgtggcactttaacattgctttcacctatattttgtgtactttgttacttgcatgtatgaattttgttatgtaaaatatagttatagacctaaa

SEQ ID NO: 303 - protein, 643 aa, Homo sapiens
MQAPRELAVGIDLGTTYSCVGVFQQGRVEILANDQGNRTTPSYVAFTDTERLVGDAAKSQAALNPHNTVFDAKRLIGRKFADTTVQSDMKHWPFRVVSEGGKPKVRVCYRGEDKTFYPEEISSMVLSKMKETAEAYLGQPVKHAVITVPAYFNDSQRQATKDAGAIAGLNVLRIINEPTAAAIAYGLDRRGAGERNVLIFDLGGGTFDVSVLSIDAGVFEVKATAGDTHLGGEDFDNRLVNHFMEEFRRKHGKDLSGNKRALRRLRTACERAKRTLSSSTQATLEIDSLFEGVDFYTSITRARFEELCSDLFRSTLEPVEKALRDAKLDKAQIHDVVLVGGSTRIPKVQKLLQDFFNGKELNKSINPDEAVAYGAAVQAAVLMGDKCEKVQDLLLLDVAPLSLGLETAGGVMTTLIQRNATIPTKQTQTFTTYSDNQPGVFIQVYEGERAMTKDNNLLGRFELSGIPPAPRGVPQIEVTFDIDANGILSVTATDRSTGKANKITITNDKGRLSKEEVERMVHEAEQYKAEDEAQRDRVAAKNSLEAHVFHVKGSLQEESLRDKIPEEDRRKMQDKCREVLAWLEHNQLAEKEEYEHQKRELEQICRPIFSRLYGGPGVPGGSSCGTQARQGDPSTGPIIEEVD

SEQ ID NO: 304 - DNA, 102 bp, Homo sapiens
ccctcctgccccacatggagtcccccagatagaggtgacgtttgacattgatgctaatggcatcctgagcgtgacagccactgacaggagcacaggtaaggc

SEQ ID NO: 305 - DNA, 2493 bp, Homo sapiens
cccgggcgggcgggcgggaggctctcgactgggcgggaaggtgcgggaaggttcgcggcggcggggtcggggaggtgcaaaaggatgaaaagcccgtggaagcggagctgagcagatccgagccgggctggcggcagagaaaccgcagggagagcctcactgctgagcgcccctcgacggcggagcggcagcagcctccgtggcctccagcatccgacaagaagcttcagccatgcaggccccacgggagctcgcggtgggcatcgacctgggcaccacctactcgtgcgtgggcgtgtttcagcagggccgcgtggagatcctggccaacgaccagggcaaccgcaccacgcccagctacgtggccttcaccgacaccgagcggctggtcggggacgcggccaagagccaggcggccctgaacccccacaacaccgtgttcgatgccaagcggctgatcgggcgcaagttcgcggacaccacggtgcagtcggacatgaagcactggcccttccaggtggtgagcgagggcggcaagcccaaggtgcgcgtatgctaccgcggggaggacaagacgttctaccccgaggagatctcgtccatggtgctgagcaagatgaaggagacggccgaggcgtacctgggccagcccgtgaagcacgcagtgatcaccgtgcccacctatttcagtaactcgcagcgccaggccaccaaggacgcgggggccatcgcggggctcaaggtgctgccgatcatcaatgaggccacggcagcagccatcgcctatgggctggaccggcggggcgcgggaaagcgcaacgtgctcatttttgacctgggtgggggcaccttcgatgtgtcggttctctccattgacgccggtgtctttgaggtgaaagccactgctggagatacccacctgggaggagaggacttcgacaaccggctcgtgaaccacttcatggaagaattccggcggaagcatgggaaggacctgagcgggaacaagcgtgccctgcgcaggctgcgcacagcctgtgagcgcgccaagcgcaccccgtcctccagcacccaggccaccctggagatagactccctgttcgagggcgtggacttctacaagtccatcactcgtgcccgctttgaggaactgtgctcagacctcttccgcagcaccctggagccggtggagaaggccctgcgggatgccaagctggacaaggcccagattcatgacttcgtcctggggggagggctccactcgcatccccaaggtgcagaagttgctgcaggacttcttcaacggcaaggagctgaacaagagcatcaaccctgatgaggctgtggcctatgggtctgctgtgcaggcggccgtgttgatgggggacaaatgtgagaaagtgcaggatctcctgctgctggatgtggctcccctgtctctggggctggagacagcaggtggggtgatgaccacgctgatccagaggaacgccactatccccaccaagcagacccagactttcaccacctactcggacaaccagcctggggtcttcatccaggtgtatgaggttgagagggccatgaccaaggacaacaacctgctggggcgttttgaactcattggcatccctcctgccccacatggagtcccccagatagaggtgacgtttgacattgatgctaatggcatcctgagcgtgacagccactgacaggagcacaggtaaggctaacaagatcaccaatgacaagggccggctgagcaaggaggaggtggagaggatggttcatgaagccgagcagtacggggctgaggatgaggcccagagggacagagtggctgccaaaaactcgctggaggcccatgtcttccatgtgaaaggttctttgcaagaggaaagccttagggacaagattcccgaagaggacaggcgcaaagtgcaagacaagtgtcaggaagtccttgcctggctggagcacaaccagctggcagagaaggaggagtatgagcatcagaagagggagctggagcaaatctgtcgccccatcttctccaggctctatggggggcctggtgtccctgggggcagcagttgtagcgctcaagcccaccagggggaccccagcaccggccccatcattgaggaggttgattgaatggcccttcgtgataagtcagctgtgactgtcagggctatgctatgggccttctagactgtcttctatgatcctgcccttcagagatgaagggcttgggggggtcttccctccaaagctagaactttctttccaggataactgaagtcttttgactttttggggggagggcggttcatcctcttctgcttcaaataaaaagtcattaatttattaaaacttgtgtggcactttaacattgctttcacctatattttgtgtattttgttacttgtatgtatgaattttgttatgtaaaatatagttatagacctaaataaacttttaaaactcc

SEQ ID NO: 306 - skipped

SEQ ID NO: 307 - DNA, 105 bp, Homo sapiens
ttccaccactgcatgtctgggagggagcaggtcagcctggtggacccggagtacctgccccggagacacgttaagctggacccgccctctgacttgcagagcaac

SEQ ID NO: 308 - DNA, 2038 bp, Homo sapiens
gctgtgcacccagagatagttgggtgacaaatcacctccaggttggggatgcctcagacttgtgatgggactgggcagatgcatctgggaaggctggaccttggagagtgaggccctgaggcgagacatgggcacctggctcctggcctgcatctgcatctgcacctgtgtctgcttgggagtctctgtcacaggggaaggacaagggccaaggtctagaaccttcacctgcctcaccaacaacattctcaggatcgattgccactggtctgccccagagctgggacagggctccagcccctggctcctcttcaccagcaaccaggctcctggcggcacacataagtgcatcttgcggggcagtgagtgcaccgtcgtgctgccacctgaggcagtgctcgtgccatctgacaatttcaccatcactttccaccactgcatgtctgggagggagcaggtcagcctggtggacccggagtacctgccccggagacacgttaagctggacccgccctctgacttgcagagcaacatcagttctggccactgcatcctgacctggagcatcagtcctgccttggagccaatgaccacacttctcagctatgagctggccttcaagaagcaggaagaggcctgggagcaggcccagcacagggatcacattgtcggggtgacctggcttatacttgaagcctttgagctggaccctggctttatccatgaggccaggctgcgtgtccagatggccacactggaggatgatgtggtagaggaggagcgttatacaggccagtggagtgagtggagccagcctgtgtgcttccaggctccccagagacaaggccctctgatcccaccctgggggtggccaggcaacacccttgttgctgtgtccatctttctcctgctgactggcccgacctacctcctgttcaagctgtcgcccagggtgaagagaatcttctaccagaacgtgccctctccagcgatgttcttccagcccctctacagtgtacacaatgggaacttccagacttggatgggggcccacggggccggtgtgctgttgagccaggactgtgctggcaccccacagggagccttggagccctgcgtccaggaggccactgcactgctcacttgtggcccagcgcgtccttggaaatctgtggccctggaggaggaacaggagggccctgggaccaggctcccggggaacctgagctcagaggatgtgctgccagcagggtgtacggagtggagggtacagacgcttgcctatctgccacaggaggactgggcccccacgtccctgactaggccggctcccccagactcagagggcagcaggagcagcagcagcagcagcagcagcaacaacaacaactactgtgccttgggctgctatgggggatggcacctctcagccctcccaggaaacacacagagctctgggcccatcccagccctggcctgtggcctttcttgtgaccatcagggcctggagacccagcaaggagttgcctgggtgctggctggtcactgccagaggcctgggctgcatgaggacctccagggcatgttgctcccttctgtcctcagcaaggctcggtcctggacattctaggtccctgactcgccagatgcatcatgtccattttgggaaaatggactgaagtttctggagcccttgtctgagactgaacctcctgagaaggggcccctagcagcggtcagaggtcctgtctggatggaggctggaggctcccccctcaacccctctgctcagtgcctgtggggagcagcctctaccctcagcatcctggccacaagttcttccttccattgtcccttttctttatccctgacctctctgagaagtggggtgtggtctctcagctgttctgccctcatacccttaaagggccagcctgggcccagtggacacaggtaaggcaccatgaccacctggtgtgacctctctgtgccttactgaggcacctttctagagattaaaaggggcttgatggctgtt

SEQ ID NO: 309 - protein, 521 aa, Homo sapiens
MGLGRCIWEGWTLESEALRRDMGTWLLACICICTCVCLGVSVTGEGQGPRSRTFTCLTNNILRIDCHWSAPELGQGSSPWLLFTSNQAPGGTHKCILRGSECTVVLPPEAVLVPSDNFTITFHHCMSGREQVSLVDPEYLPRRHVKLDPPSDLQSNISSGHCILTWSISPALEPMTTLLSYELAFKKQEEAWEQAQHRDHIVGVTWLILEAFELDPGFIHEARLRVQMATLEDDVVEEERYTGQWSEWSQPVCFQAPQRQGPLIPPWGWPGNTLVAVSIFLLLTGPTYLLFKLSPRVKRIFYQNVPSPAMFFQPLYSVHNGNFQTWMGAHGAGVLLSQDCAGTPQGALEPCVQEATALLTCGPARPWKSVALEEEQEGPGTRLPGNLSSEDVLPAGCTEWRVQTLAYLPQEDWAPTSLTRPAPPDSEGSRSSSSSSSSNNNNYCALGCYGGWHLSALPGNTQSSGPIPALACGLSCDHQGLETQQGVAWVLAGHCQRPGLHEDLQGMLLPSVLSKARSWTF

SEQ ID NO: 310 - DNA, 109 bp, Homo sapiens
gttgtgcggccaccacttcgtacgcgcgctagtgcgcgtgtgcgggggcccccgctggtccaccgaagccaggaggcctgcgaccggaggcgaccgtgagttgctacag

SEQ ID NO: 311 - DNA, 846 bp, Homo sapiens
gccacccaccaccatggacccccgtctgcccgcctgggcgctggtgctgctgggccctgccctggtgttcgcgttgggccccgcgcccaccccagagatgcgtgagaagttgtgcggccaccacttcgtacgcgcgctagtgcgcgtgtgcgggggcccccgctggtccaccgaagccaggaggcctgcgaccggaggcgaccagagggagtctcactctgtttcccaggctggtctcaaactcctgagctcaagtaatcctcccaccttgaccttccaaagtgttgggattagcgatgtgagttgctacagtggctggagagacgacatctgctccatgggctggtggccgacagtaatctcacgctgggacctggcctgcagcccctgccccagacctctcaccatcaccgccaccaccgtgcagctgccaccaaccctgcacgctactgctgcctcagtggctgtacccaacaagacctgctgaccctctgtccctactgattcctccttgggtgcagcctcagagtggcctgaggcccagagggtctggtctggtgagctcctgaggccacacagcaccataaagtctcgcatctacaggcctttgattacctcctgggatgggtgctcactatctaccccagaccaatgccacctgcagcctgtggagtcaactgcagaataaatcacaccctagccctggcttggaggatccccgctttcacagatgctggacactgacagccaaatgtcctcactccaggggagccccagacgctccgctccctgcatgtgtaacaccccttcttgctgtctcttagtaaataaacgacccaaagcagc

SEQ ID NO: 312 - protein, 157 aa, Homo sapiens
MDPRLPAWALVLLGPALVFALGPAPTPEMREKLCGHHFVRALVRVCGGPRWSTEARRPATGGDQRESHSVSQAGLKLLSSSNPPTLTFQSVGISDVSCYSGWRDDICSMGWWPTVISRWDLACSPCPRPLTITATTVQLPPTLHATAASVAVPNKTC

SEQ ID NO: 313 - DNA, 102 bp, Homo sapiens
caagaccatcggtgaccttttacaggtcctccaggagatgggacatcgtcgagctattcatttaattacaaactatggagcagtgttgagtccttcagagaa

SEQ ID NO: 314 - DNA, 8328 bp, Homo sapiens
aggatttccgcggttgtgtaacggcctgtcgcaggcgtgcagggacctggactccgcctcgtccccggggctcgggcagccgagccatggcggggaactgtggggcccgcggcgcgctgtcggcgcacacgctgctgttcgacctgccgcccgcgctgctcggagagctctgcgctgttctggacagctgcgacggcgcgctgggctggcgcggcctggcagagagactttcaagcagctggctggatgttcgtcatattgaaaagtatgtagaccaaggtaaaagtggaacaagagaattactttggtcctgggcacagaaaaacaagaccatcggtgaccttttacaggtcctccaggagatgggacatcgtcgagctattcatttaattacaaactatggagcagtgttgagtccttcagagaagagttatcaggaaggtggatttccaaatatattattcaaggaaacagccaatgtcaccgtggataatgttcttattcctgaacataatgaaaaaggaatactgcttaaatcttccatcagctttcaaaatatcatagaaggaactagaaatttccacaaagacttcctaattggagaaggagagatttttgaggtatacagagtggagattcaaaacctaacatatgctgtcaaattatttaaacaggagaaaaaaatgcagtgtaagaagcattggaagaggtttttatctgagcttgaagttttactactgtttcatcacccaaacatactagagttggctgcatattttacagagactgagaagttctgtctgatttatccatacatgagaaatggaacactttttgacagattgcagtgtgtaggtgacacggccccactcccttggcacattcgaatcggtatattaataggaatatccaaagccattcactacctgcacaacgttcaaccatgctcggtcatctgtggcagtatatcaagtgcaaacatccttttggatgatcagtttcaacccaaactaactgattttgccatggcacacttccggtcccacctagaacatcagagttgtaccataaatatgaccagcagcagcagtaaacatctgtggtacatgccagaagagtacatcagacaggggaaactttccattaaaacagatgtctacagctttggaattgtaataatggaagttctaacaggatgtagagtagtgttagatgatccaaaacatatccagctgcgggatctccttagagaattgatggagaagagaggcctggattcatgtctctcatttctagataagaaagtgcctccctgccctcggaatttctctgccaagctcttctgtttggcaggccggtgtgctgcaacgcgggcaaagttaagaccatcaatggatgaagttttaaatactcttgaaagtactcaagccagcttgtattttgctgaagatcctcccacatcactaaagtccttcaggtgtccttctcctctattcctggagaatgtaccaagtattccagtggaagatgatgaaagccagaataacaatttactaccttctgatgaaggcctgaggatagacagaatgactcagaaaactccttttgaatgcagccagtctgaggttatgtttctgagcttggacaaaaagccagagagcaagagaaatgaggaagcttgcaacatgcccagttcttcttgtgaagaaagttggttcccaaagtatatagttccatcccaggacttaaggccctataaggtaaatatagatccttcttcagaagctccagggcattcttgcaggagcaggccagtggagagcagctgttcctccaaattttcctgggatgaatatgaacagtacaaaaaagaataaattctaccagaagataaagaaaaaagcaagtattgcataggcacctgagcataggtatgaccttgggaagacattggctccataagcaatgccaagagaatgatcaatagtgagtttgggtgatgcagataaacaatctggataattccatttcttttttcccaaaccctcaaacagagtgccttaaaaaattgttttatcaggataattgtctcatgaccaaatccacgctcaattagagccattcaaaattccttaagatcatgggttctgacttcagccaaacaaaacaatcaaaacctaccaaaaagggactggattgtaatgtcctctccatcatcctcagtgtgagtcctcagagcctccatctgccaagaacattcagttggattccatcgtttggtttagcttgcttgcacgggttgtaggaaatgtctaatttgtaaatgttaatagatacctttggaaagaatcaccttgttattctgattgacccctcttgttttttggttaatccctgactagcctgcttgtctgaaaatgagccaggttcacccttagctacggcatgctctgggttgaaaggggatttcttcccaagatctatcctaaactcttaggacagtttatcctgtattgactattattacagctttttaaaaacagacttagtgacctattatatcttaaggagactatgtgaaatgtccatcaagtaatttttattcctgagaaaatggctggtcaagggcctaggtcagctttttgtttaatctacacctttcaactctgggccttcattcctgctgtttcttggatctccctcttttgaaatcctaccaatcatcagagctctacaaaacagccacctcctggaagcttccctaatctctacaaccagaagtactccctttatcagtatttccacagcaatttctttgtatttctattttatatttatcactttctgaattatatcaaagctgcttgtcttatctctttttttttttgagacggagtctcgctctgtcatccaggctggagtgcagtggcacaatctcggctcaccgcaaggtctgcctcccgggttcacgccattctcctgcctcagcctcccgagtaaaggtgggactacaggcgcccgccactacgcccggctaattttttgtatttttagtagagacggggtttcaccatgttaggcaggatggtctcgatctcctgacctcatgatccgcctgcctggcctcccaaagtgctgggattacaggcgtgagccaccgcgcccagccttcatctcttttactaggttgtaaactccctatattagttttctattgtttttgtaacacattatcacaaatttagtgacttaaagtaacataaattaattattttgcagttctggaggtcagaattccttagcattctttctggaggctgttggggagaactcactgccttgccttttccagcttctagaggccacctgccttctttggctcatggcctcttcctccgtcttcaaagccagcaacgtgacatttcagatctccctctctctgtctgtctcaccgcatctcttcactaccctcttcctctcattctggcccttctgcatgtcttttataaagacctttgtgatttcactgggcccactcatataagccaggaaaatctctgtgtctcagatccttaatttaattacacctgcaaagtccgttttctcgtgtaaagtaacatattcacaggtttctggaattgggacgtggacatcttcgggggaccattactctgtctgtcatactccctgagtgtgtaagggccatctcttcagagcctaatgtgtcatcctacacagagcaggtgtttccttataaattaagttgaattaaattacccctatgaagccacataatcaataattcagctataataaacattgccgaataaattaacaaagggaggataatgactccttatgatgatggatagaaacactgaagaaaaccattttcagaggatttactgaattttcctctccaaggagcttgtaatagaagggtaaacctctagtttcttgtccagcagaggaataggctcatgtcttttgttttattttatttttttggtgagtcagtatggttgggttaatcatattcacattagattccatgttgaagaacaactaatcaaagaagaaaatcatcaggaatcagggtgagattaacagaccaaggtcagaaacatggagttacaattttccaaaaaagcacgaagtgagattaaaaccacagtaagtcttagtctgactgacaggctttatacaggccctcggtaagcagttgggagaacccatgcccaccactgctctgtacggtatctggctgctcagagctctctgattcacaaaagagatcatcaagaattgactctgtgttaaactgtttttcacttagaatatggacccccaccaatacattcaatgaagggtcattaaggaagctctgattaacaccaggcccatgcagttactccgcacatataatctgtgggtattatgttgatttgaacttgcttagctgacttaaagcagggtttctcaaactgtagtatgcatcagaatgacttggaaagctggttaaaaacgcagattgctgggtccacccagcttctgatgcaataggtctggggttagaaattttgctttctaatgagttcccaggtgatgctgatgccaatgatgtgaagcccgctcttcacatccgtgaaaatcgctgccttaaggtgctcttaaattgttatagattggtagatcctacctttccatcactggtatgttttttgagaaaaggatcctttcttttcattctgttatattcatcctattacataggatgttggttagcacagagtgggagctctagaaagattgttgaccaatcatcttattgactagaccatctttctagagtataactattttggacacctcaaagatgaagtcagataagctggcagtgacctgattaacgttgtggtaagcagatgccactgtggctgggaagtaccaaatcttctgttgagtgattcagtcttcctgactagatttgccttctagtgggtgtattaataagcgttagttgatatgaattaaatgttgcaactttctatgggtaataagaggatacctttatagtttcatgatgtggagaccaagatacataagaaagcaagaatgagtctccgggtgttccctctgatcagcaaacatgaattcataatttcatttactctcatttttgtaatgcactctgagcaatcctccaggcagatcctatttactaagcttcaggcttttgtcccattttataatgcccaaacacatggagaaaacattttgttgtttttaaaaacaggtatgggatttctgatataatcaattttattgacttcttgggagttgtaatgatctgtgactcactgcataatattgtagttttatagggtggcacatcaccctgtgtaaaacaactttaatgacctgaggactgatgagtacaggaagtgaggtttatcatgagtagcatttattaagcatctgctagaatcaaagcactgcattagctactaaggtacaaagtaagacacagtttaataaggaagacagggcatctacccaagtcaacagttcagtgacatctgttatttgaaccacacaccaatgcaaccgaagtaaatgctgaaagggtgagaagaaggaatagattactatgcatttttgagaggatgaagaaggcttcttggagaaggtttctgaaaagagatacggaattaagagaaatagaaaagagcactgacgaagcactcaggatggctattcaaggaattggggatccacagcagctgtgcacaaccatccctaatgccagaaaaatggggtaagggtgaagggaactgggtctagagctttgcatgtttttttctggttaacccttagagtcaccctgaaggtgtggatcccatcttataataaggtgaggacactgagtcaggaaactaacttgctaaaatcaagtcctcccagtcctcccatcaggtccttccagatctggaggagccaggatttgaactcacatttgtctgacttcaaaatccatgctttttcttgtgttccaaattgcacaatggagtcactgccagttcaagctcctatgaaaagggatggatgtgaaaagtcatttgttgattccacagatttttagtaggtaccatgtctcctgcctttatcactatcctactcctctgctacaacttctctgctacaggcacccactgcagttacttgatatgagttaaatgaatccatccatccaaacttccattcattgaataaatacttagcaatggcttcctttgtatcaggcactattctaggagctggggctacagtgcagatggaaaccagcaaagctcactgccctcatggagcttatatgtaagtgaataaatctcagggtggttctcctgtcataggtcctggctcctctgccagctcttccaaatgggttcagagaggttttctccttgtcctgttgtgtaactgataatcccatggtggacctcactttgctattcatatgcactaagtagtttatggtgtgctttgtggctggcaattgtgacagattctattcttctattggtatgtggtttctttggggcatttgtttggatactgatggcatcttccgggggtctgaggcacctacacaaacctcaggtcactatcacgtgatactggagttgcctgttaaattatatttcttcttccacaaaactgcaggttccctgagggaaaggtctatgtcctgctcatttttggatccctaatggctggcacagtacctggtgcataatatggttcaacaaatatttgtaaaatgaatgaatcaaatagtccttcaaagcatcttcagaatcaagattgtcatctagattgcacccgaagtttatctttctagtattcagaatataatcaatcattgcttaaattattccatttcatcattcttgaataaaagctactaattttaaatactaatatctgagatatcttcgaaaagaagattagtcgttgtatgtgttgcttataaattttctctatggtggaaaatattcccaaaccatgtctaagcaatgaaaaaccagtgttctggcaggaaataaactgatgtttgttgtgttttgtatctgtcttcccgttccaaatcatttatatatacttgatggtctgtgggcttgacttgcaagtattttcctgggagacatttttattcaaaagacctgtattgcctgccaaaccttcatttaagagactcattatggatgtcatctgcatcattgcaaacttttctggtcgtctctataaatagcaagataatatttacagagttttacattggctcttgaattttaaaatattcttatagacaaacattaattggaatggggggtaaggaggtaggaatggcttacttgcggaaatgcaggctcattgttgtgtctagtaggtgctaggtgcattcacacatctcttaagctttaaacaacctattgagccggtttccatttccttgatctattagatttaaaaaaatgaagcataaaggagttggctcttgccctaagtcatactactgatggaatgagaatacaaaccaaaaacactttattcaagtccaggaaatatctgccttgaaaaagaataacttaaaaattaaaagtgtcctctatttgaacatgaaaacagctaataaagatgtgttattttattttattattattaattttgtcctcccatattggcaaagataaagcaattgacaaaaatggaattcttgttcaatactggcaggagtgaaaattggtagaacctttctagaaggcaatttggcaacatgtatgaaaacctaaatgttgatacacctttacccagcagtttgtttaggaatttatcctaatgaataaaagttgtccaagtcttcaaacatgagcccaaaggtatatttcatgatgtttatgatattaaaacattggaaacaactgaaacatccttcagtaaaagatggattaaataaattccatgcagttgtcatttaaaaatatttagatatatgtttattgctatggatatatgttcccaaaatattattgaatcaaaaagtagactacaggatatatgttgaatatgagctcatttataacattgaatattttaagataatgtatgtttcatagagagatcttcaccaaatgttaaggatttttttttctgggctgtggtatttgggtgatctttacattcttcagactcatgtgtgtttgaaactttttataatgaacatatatcatttttattagaaaagaataaagtttttgaaaaaaaaaa

SEQ ID NO: 315 - protein, 596 aa, Homo sapiens
MAGNCGARGALSAHTLLFDLPPALLGELCAVLDSCDGALGWRGLAERLSSSWLDVRHIEKYVDQGKSGTRELLWSWAQKNKTIGDLLQVLQEMGHRRAIHLITNYGAVLSPSEKSYQEGGFPNILFKETANVTVDNVLIPEHNEKGILLKSSISFQNIIEGTRNFHKDFLIGEGEIFEVYRVEIQNLTYAVKLFKQEKKMQCKKHWKRFLSELEVLLLFHHPNILELAAYFTETEKFCLIYPYMRNGTLFDRLQCVGDTAPLPWHIRIGILIGISKAIHYLHNVQPCSVICGSISSANILLDDQFQPKLTDFAMAHFRSHLEHQSCTINMTSSSSKHLWYMPEEYIRQGKLSIKTDVYSFGIVIMEVLTGCRVVLDDPKHIQLRDLLRELMEKRGLDSCLSFLDKKVPPCPRNFSAKLFCLAGRCAATRAKLRPSMDEVLNTLESTQASLYFAEDPPTSLKSFRCPSPLFLENVPSIPVEDDESQNNNLLPSDEGLRIDRMTQKTPFECSQSEVMFLSLDKKPESKRNEEACNMPSSSCEESWFPKYIVPSQDLRPYKVNIDPSSEAPGHSCRSRPVESSCSSKFSWDEYEQYKKE

SEQ ID NO: 316 - DNA, 104 bp, Homo sapiens
gccccagagggtggctttgatgccatcatgcaggctacagtctgtgatgaaaagattggctggaggaatgatgcatcccacttgctggtgtttaccactgatgc

SEQ ID NO: 317 - DNA, 4894 bp, Homo sapiens
cgccgcgggaggcggacgagatgcgagcgcggccgcggccccggccgctctgggcgactgtgctggcgctgggggcgctggcgggcgttggcgtaggagggcccaacatctgtaccacgcgaggtgtgagctcctgccagcagtgcctggctgtgagccccatgtgtgcctggtgctctgatgaggccctgcctctgggctcacctcgctgtgacctgaaggagaatctgctgaaggataactgtgccccagaatccatcgagttcccagtgagtgaggcccgagtactagaggacaggcccctcagcgacaagggctctggagacagctcccaggtcactcaagtcagtccccagaggattgcactccggctccggccagatgattcgaagaatttctccatccaagtgcggcaggtggaggattaccctgtggacatctactacttgatggacctgtcttactccatgaaggatgatctgtggagcatccagaacctgggtaccaagctggccacccagatgcgaaagctcaccagtaacctgcggattggcttcggggcatttgtggacaagcctgtgtcaccatacatgtatatctccccaccagaggccctcgaaaacccctgctatgatatgaagaccacctgcttgcccatgtttggctacaaacacgtgctgacgctaactgaccaggtgacccgcttcaatgaggaagtgaagaagcagagtgtgtcacggaaccgagatgccccagagggtggctttgatgccatcatgcaggctacagtctgtgatgaaaagattggctggaggaatgatgcatcccacttgctggtgtttaccactgatgccaagactcatatagcattggacggaaggctggcaggcattgtccagcctaatgacgggcagtgtcatgttggtagtgacaatcattactctgcctccactaccatggattatccctctttggggctgatgactgagaagctatcccagaaaaacatcaatttgatctttgcagtgactgaaaatgtagtcaatctctatcagaactatagtgagctcatcccagggaccacagttggggttctgtccatggattccagcaatgtcctccagctcattgttgatgcttatgggaaaatccgttctaaagtagagctggaagtgcgtgacctccctgaagagttgtctctatccttcaatgccacctgcctcaacaatgaggtcatccctggcctcaagtcttgtatgggactcaagattggagacacggtgagcttcagcattgaggccaaggtgcgaggctgtccccaggagaaggagaagtcctttaccataaagcccgtgggcttcaaggacagcctgatcgtccaggtcacctttgattgtgactgtgcctgccaggcccaagctgaacctaatagccatcgctgcaacaatggcaatgggacctttgagtgtggggtatgccgttgtgggcctggctggctgggatcccagtgtgagtgctcagaggaggactatcgcccttcccagcaggacgaatgcagcccccgggagggtcagcccgtctgcagccagcggggcgagtgcctctgtggtcaatgtgtctgccacagcagtgactttggcaagatcacgggcaagtactgcgagtgtgacgacttctcctgtgtccgctacaagggggagatgtgctcaggccatggccagtgcagctgtggggactgcctgtgtgactccgactggaccggctactactgcaactgtaccacgcgtactgacacctgcatgtccagcaatgggctgctgtgcagcggccgcggcaagtgtgaatgtggcagctgtgtctgtatccagccgggctcctatggggacacctgtgagaagtgccccacctgcccagatgcctgcacctttaagaaagaatgtgtggagtgtaagaagtttgaccggggagccctacatgacgaaaatacctgcaaccgttactgccgtgacgagattgagtcagtgaaagagcttaaggacactggcaaggatgcagtgaattgtacctataagaatgaggatgactgtgtcgtcagattccagtactatgaagattctagtggaaagtccatcctgtatgtggtagaagagccagagtgtcccaagggccctgacatcctggtggtcctgctctcagtgatgggggccattctgctcattggccttgccgccctgctcatctggaaactcctcatcaccatccacgaccgaaaagaattcgctaaatttgaggaagaacgcgccagagcaaaatgggacacagccaacaacccactgtataaagaggccacgtctaccttcaccaatatcacgtaccggggcacttaatgataagcagtcatcctcagatcattatcagcctgtgccacgattgcaggagtccctgccatcatgtttacagaggacagtatttgtggggagggatttggggctcagagtggggtaggttgggagaatgtcagtatgtggaagtgtgggtctgtgtgtgtgtatgtgggggtctgtgtgtttatgtgtgtgtgttgtgtgtgggagtgtgtaatttaaaattgtgatgtgtcctgataagctgagctccttagcctttgtcccagaatgcctcctgcagggattcttcctgcttagcttgagggtgactatggagctgagcaggtgttcttcattacctcagtgagaagccagctttcctcatcaggccattgtccctgaagagaagggcagggctgaggcctctcattccagaggaagggacaccaagccttggctctaccctgagttcataaatttatggttctcaggcctgactctcagcagctatggtaggaactgctgggcttggcagcccgggtcatctgtacctctgcctcctttcccctccctcaggccgaaggaggagtcagggagagctgaactattagagctgcctgtgccttttgccatcccctcaacccagctatggttctctcgcaagggaagtccttgcaagctaattctttgacctgttgggagtgaggatgtctgggccactcaggggtcattcatggcctgggggatgtaccagcatctcccagttcataatcacaacccttcagatttgccttattggcagctctactctggaggtttgtttagaagaagtgtgtcacccttaggccagcaccatctctttacctcctaattccacaccctcactgctgtagacatttgctatgagctggggatgtctctcatgaccaaatgcttttcctcaaagggagagagtgctattgtagagccagaggtctggccctatgcttccggcctcctgtccctcatccatagcacctccacatacctggccctgtgccttggtgtgctgtatccatccatggggctgattgtatttaccttctacctcttggctgccttgtgaaggaattattcccatgagttggctgggaataagtgccaggatggaatgatgggtcagttgtatcagcacgtgtggcctgttcttctatgggttggacaacctcattttaactcagtctttaatctgagaggccacagtgcaattttattttatttttctcatgatgaggttttcttaacttaaaagaacatgtatataaacatgcttgcattatatttgtaaatttatgtgatggcaaagaaggagagcataggaaaccacacagacttgggcagggtacagacactcccacttggcatcattcacagcaagtcactggccagtggctggatctgtgaggggctctctcatgatagaaggctatggggatagatgtgtggacacattggacctttcctgaggaagagggactgttcttttgtcccagaaaagcagtggctccattggtgttgacatacatccaacattaaaagccacccccaaatgcccaagaaaaaaagaaagacttatcaacatttgttccatgagcagaaaactggagctctggcctcagtgttacagctaaataatctttaattaaggcaagtcactttcttcttcttaaagctgttttctagtttgagaaatgatgggattttagcagccagtcttgaaggtctctttcagtatcaacattctaagatgctgggacttactgtgtcatcaaatgtgcggttaagattctctgggatattgatactgtttgtgtttttagttgggagatctgagagacctggctttggcaagagcagatgtcattccatatcacctttctcaatgaaagtctcattctatcctctctccaaacccgttttccaacatttgttaatagttacgtctctcctgatgtagcacttaagcttcatttagttattatttctttcttcactttgcacacatttgcatccacatattagggaagaggaatccataagtagctgaaatatctattctgtattattgtgttaacattgagaataagccttggaattagatatggggcaatgactgagccctgtctcacccatggattactccttactgtagggaatggcagtatggtagagggataaatagggggcggggagggatagtcatggatccaagaagtccttagaaatagtggcagggaacaggtgtggaagctcatgcctgtaattataaccttcagctactaagacaggtgtggtggctcacgcctgtgattataatcttcagttactaagacagagtccatgagagtgttaatgggacattttctttagataagatgttttatatgaagaaactgtatcaaagggggaagaaaatgtatttaacaggtgaatcaaatcaggaatcttgtctgagctactggaatgaagttcacaggtcttgaagacca

SEQ ID NO: 318 - protein, 788 aa, Homo sapiens
MRARPRPRPLWATVLALGALAGVGVGGPNICTTRGVSSCQQCLAVSPMCAWCSDEALPLGSPRCDLKENLLKDNCAPESIEFPVSEARVLEDRPLSDKGSGDSSQVTQVSPQRIALRLRPDDSKNFSIQVRQVEDYPVDIYYLMDLSYSMKDDLWSIQNLGTKLATQMRKLTSNLRIGFGAFVDKPVSPYMYISPPEALENPCYDMKTTCLPMFGYKHVLTLTDQVTRFNEEVKKQSVSRNRDAPEGGFDAIMQATVCDEKIGWRNDASHLLVFTTDAKTHIALDGRLAGIVQPNDGQCHVGSDNHYSASTTMDYPSLGLMTEKLSQKNINLIFAVTENVVNLYQNYSELIPGTTVGVLSMDSSNVLQLIVDAYGKIRSKVELEVRDLPEELSLSFNATCLNNEVIPGLKSCMGLKIGDTVSFSIEAKVRGCPQEKEKSFTIKPVGFKDSLIVQVTFDCDCACQAQAEPNSHRCNNGNGTFECGVCRCGPGWLGSQCECSEEDYRPSQQDECSPREGQPVCSQRGECLCGQCVCHSSDFGKITGKYCECDDFSCVRYKGEMCSGHGQCSCGDCLCDSDWTGYYCNCTTRTDTCMSSNGLLCSGRGKCECGSCVCIQPGSYGDTCEKCPTCPDACTFKKECVECKKFDRGALHDENTCNRYCRDEIESVKELKDTGKDAVNCTYKNEDDCVVRFQYYEDSSGKSILYVVEEPECPKGPDILVVLLSVMGAILLIGLAALLIWKLLITIHDRKEFAKFEEERARAKWDTANNPLYKEATSTFTNITYRGT

SEQ ID NO: 319 - DNA, 109 bp, Homo sapiens
ccagtgtttccagagcctggcaatggatgccattcacatcggcatgtccagcacccccctggtgaagcacactgctggggctgggctcaaggccaacagaccccgcgtc

SEQ ID NO: 320 - DNA, 8407 bp, Homo sapiens
agttcctccaggtaattcttactcaaacttgtaccaacttgtttttgactgacagtgaacagtgagagagttttcttcattttgaggaaccctaaacacctatctttcccaaggcaacctgtctggactgagcatttctctgacttgacataacttcccatccagccaggagtctgcactcttcagtctttgcaggcagtagcagaatcccatggtagccaggtgggtgaaggggagcgaggacgttctacctgccttgaagaagacacctgacctgcggagtgagtgaccagtgtttccagagcctggcaatggatgccattcacatcggcatgtccagcacccccctggtgaagcacactgctggggctgggctcaaggccaacagaccccgcgtcatgtccaagagtgggcacagcaacgtgagaattgacaaagtggatggcatatacctactctacctgcaagacctgtggaccacagttatcgacatgaagtggagatacaaactcaccctgttcgctgccacttttgtgatgacctggttcctttttggagtcatctactatgccatcgcgtttattcatggggacttagaacccggtgagcccatttcaaatcataccccctgcatcatgaaagtggactctctcactggggcgtttctcttttccctggaatcccagacaaccattggctatggagtccgttccatcacagaggaatgtcctcatgccatcttcctgttggttgctcagttggtcatcacgaccttgattgagatcttcatcaccggaaccttcctggccaaaatcgccagacccaaaaagcgggctgagaccatcaagttcagccactgtgcagtcatcaccaagcagaatgggaagctgtgcttggtgattcaggtagccaatatgaggaagagcctcttgattcagtgccagctctctggcaagctcctgcagacccacgtcaccaaggagggggagcggattctcctcaaccaagccactgtcaaattccacgtggactcctcctctgagagccccttcctcattctgcccatgacattctaccatgtgctggatgagacgagccccctgagagacctcacaccccaaaacctaaaggagaaggagtttgagcttgtggtcctcctcaatgccactgtggaatccaccagcgctgtctgccagagccgaacatcttatatcccagaggaaatctactggggttttgagtttgtgcctgtggtatctctctccaaaaatggaaaatatgtggctgatttcagtcagtttgaacagattcggaaaagcccagattgcacattttactgtgcagattctgagaaacagcaactcgaggagaagtacaggcaggaggatcagagggaaagagaactgaggacacttttattacaacagagcaatgtctgatcacaggggcgccatccaggtttaaccctgcaagctgtttccacatcagaactcccttcaaacacaaagattgctgtgaaaacgaaaatgtgtagacgcactctcaaaaactgcacggacatacaaaatcaatcttttcctttgatcttgtggctaaaccagcatttctgtgtttgagagatttcctgttaggtgcttcgtctgaaagtgaactctcataattcaaattgtataaaataaagctacatttctaagagcttggtgtagggcaattggaataatgtcctgttagataaacagacatttagcaatcctgacattaaaaggaaatgtatttctatacaagattattagctgtaatacaagatatttatttaaccaatgaccttatggctgagagttgaattgtggttcagtattcattgatctcactgctttaaaacatgctctttttgttcaagcaggaaaaatattatatctaattatgtctatgtggtaatacctaaaaagaggtagagagactctatgttcacaaaatatagtaatttcatttttacctttcttcagtggactgaattgtatggaaggaaattgatcagatctgtaattcacaactgtggaaacctacacaaatggggctgatgccattgtttcctctattttattttatttatttttgaatccactatctctttccattcaaaatatttccattcaaaatgtggttcacagacccgccacatcagcaccatccgagagcttattagtaatgtgtagattctcatgtcccagccagacttacagaattggggtctgtatcttaacaagaaccccagatgatttgtgtacaaatgaaagttcgaaagctgtgctctggacagtgttctcaaagcaactttctgaagccgtgtggaaaactgactctgtgtgggtcccgtatccctgtggcatccagacctggcctctcttcatttcattattattggccaatatttctttcagccatttcatttcttatctattaaaatggcttgcccataaaggaactgcataggattatcccctgacattccaagagcaaaataaagctcttgagagtaattgttgtctcagtcatgcttgctgattacagttagcacaaaagaaaaattcagctgcctgacaatacaggaaatgttctcagatgctgatgtttgtaaggtccggtggggccatgaggaagaagaggagctgaaggtaagaaactcataaacaagatgactctttgatgcatgaacaagatttgaaaatctcaagcctgtaaagaatacccctgctatttaaataaagctcataccaagaggtaacattttgccccgggccaaattcaggggtctagtgccctgcattcctttgaggcaaaaaataaatgggctatgactggttaaatgtccaaaaggtgaattctcatttcattcaaacaaagacagatttgcgcattcactcaagcagaatgtggccatgaatattcagcccctgcatacatacaaagatgtacgcatgattccccccaccaagcacacacacagtcacacacgcacacacacacacatgcacacacgcgcgtgcacacacgcacacatgcacacacacatacgcacacgtaaacacatgcacacatgcacacacgcgcacacatgcacacacgcacacacttgcacaggccctggctcttcaagcataatcatggtagtcatcagtgaaagacatttgaggttaagacagcaagtccttgacaaatatgttcatgtctatttggttctagttctataaaaatatgaacattgggactcagagaaaatggggaaaataaagtggattcaggttatcagtgaaatgatggtatagattacagcaaatctggatatatattgatgttactgcatttgcaaatgtcctcccattaaacagaaaatgtggctaaaatccctggcctggaactgaactagtttaaggcaggtgtaagaatagtgggaggaaagtttgtgaaagtttaaagaatgccctcaatccatgaacgagagggaggatgttgtctttaattatttagaaggtttttttttccttgtctgttgataattttatggaaggttgctttagatctccattccttaaaaaaatattacatgtcagtgtagttagatattatctcttttagttattatacttgctatttttactgtatagtgtggtataatcaacaaaaaataatgccacgggcatgtttacaccttttctgttgcactattaaattcttttcacagtattcatatcaatgctaatttgaatgtgatgccaattaaaaatcttgttcatttatattgtatatggtacaaggacgtagcataagatccaaaaaaaattttgtattgtcatttagcatatcaatttcagccaaatttggaagacttgatcatcttatcttttgctctacacactcaaaacaaatattgcagcagaaatatcaccttaaaaatatcttattttatatttagataatattgaaatcacagtctattaaaattggaaatttaattcaaataaaaatcaaacaaaatagttgtttcaatttatctaaatatctggtcttaagagtgccttaagagtgtctcgtttttaagagtgtcttaaaaaccaatatatgtataagtcaacaaatcatataatattcaataaatagctctgaagttgtatctgatttgaaacttaccattttcctggaaccttaactattattactttgtacgtaatactttcatgttactatgctaacaaaggatttaggtagccaacttaatttattatatctggtcggtcttctgcttgaaacagattcacactcaacacccaactaaggaggagccaaagtagtggagtattcctgacccaaaaaggcttttgaattttgaaacatttctaatgtgttaggttttctcaatgagaccattaaaaaacgttgtgttccatttgagaaaccagagtcaacagcagtaaatcagtgtgccccacaagccacgtcttattcagcaataaaatagtgctcacatggtgcctggcagacagtggctctggacagcaaagcactgagtcacccaaccccactcctttgggatggggttgggagtcatgcattggctccctttttcatcctggggaaattacaacacaacgcagagtgtccagaaatctaaagagctggtttaaggtgaaaaaaatgccatgaatgaatgaaccagatgtttaataaatcaaaacaactattttgttggatttttatttgaattaaatttcccaatttttaatagactgtgatttcaatattatcgaaatgtaaacaaagatatatttttaaggtggcatttctactccagcatgaaaaaaatagtggcatttgcactctagcattattctgtctcccttatttgagtcttcaatatatatgcccagctggagggagaagaagagaaaaatgaaagcactaggcctttgactaggtttggttctatatgctgtcatgatgttcaaaatgtcagacatttgaccacatggcacagtgaatactctcacgctctcaattttggctttcattcttgctagacttttcttctattaaatttctgaaataactagttttttttttttgaacttgaaaatcagctttttattttttttaattttattattattatactttaagttttagggtacatgtgcacaacgtgcaggtttgttacatatgtatacatgtgccatgttggtgtgctgcacccattaactcgtcatttagcattaggtatatctcctaatgctatccctcccccctccccccaccccacaacagtccccggtgtgtgatgttccccttcctgtgtccatgtgttctcattgttcaatttccacctatgagtgagaacatgcggtgtttggttttctgtccttgagatagtttgctgagaatgatggtttccagtttcatccaataactagttttatcatagctttccatgatgtaattttttaagcgaaaggtactaacatttccagtcttgatttccaagttttgtggtgtgcactcgaaatctagtctctgattgttaaactctgggtaggtacaagaggctcttaattttcttcctcccaggaggacttacttacacttaaaggtcaaaagcttaacattcacttctaaatggttaactgcatacactttaccctttgtaaacttcaatttatctttttttttttttttttttttttttttttttgatactgggtctcgctctgtcgcccaggctgctagagtgcagtggcgcgatttcggctcactgcaagtccgcttccaggttcacgccattctctccctcagcctcccgagtagctgggactacaggcgctcgccaccatgcccggctaattttgtttttgtgtttttagtagagacggggtttcaccgtgttaaccaggatggtctcgatctcatgacctcgtgatctgcccgcctacaagccaggtgtggtggtgcgtgcctgtaatcccagctactcaggagactgaggcaggagattcgcttgaacccgggaggtggacgttgcagtgagctaagatcgcgccactgcactccagcctgggcaacaaaagtaaaactccgtctcaaaaaaaaaaaaaaaaagaaaaagaaaaagaaaagaaaagaaaataaacgtggcaaaactagaccttcagacacttcacttcacttaaccctatggccctccttatcttgcacccaatttcttttcaacatcatacatgcttggttgactgtttcttcatatttgctgttcattctataaagtcaaatagattggtgggttaaaaaataatcaattcaaattcaaattaggaatttatggacattcagatatccacatatttgagggcaggaatttttacttttcaattggtatgttggcagtgtgtaaaaatagaagaccaagagaaggcggttgattggagttgatacttaatagctaataaaaattacaagaaaggatggtggaagtcaaaggacagaactgatacacgagtataaaagccaacgatgtcatatatgtaggcaaagtctttgtaatctgaatataatgccagagagctagggctgccaggcactctgtatgtgcagaatatgtcctatatggagtaattttttatttgtgtagacttttttaggataccttaaatgtcttacatgcaacctttttttccccatatattacaaaattgccttggaaattagacaaatcttcaaacttaactgaaactcctgtcctgaatagttatttgccaaatctgacaaatttacaaagagtgttcacataatcccaaactatgcccatttctacaagagaaatacatgcctctttatttggagtttatgatattcatacaactagtagtagagtcagggagtattccagaaacatatttccctggcttgcccaattatcaagggaaaatttcagctgaacacggggaacccagtctttgacactcctgtgtgcagtgtggagcagcgtgcactgtctgagtctccatagtgaggaatggtcttccctggggcatcaccctagaaggatgggctcaaagtcgccctccacgtgggtgcacaggagcccagattctcaagccccagttgcagaattaggctgatggttttacaaaagagtcctcctaaaagtccatcactaagttttgtttggttagcaacccttgccacatgatgtagtacttagctataattttatttttattcaaggccaaatcttatctggtgtccatgccttcccacctacttaaaatttcaaatttcaccctcaaaaatatttcagtaaataaaagttagatctactcaaaattagactccaagggaattactatagttgattatagagtatctatttccttaaaaaaaaaaaaccataagttgttgactctgagctaggaaatgcgtgatctctcagctgacttactttatgcaaatttacttaatattatagaagagtaaagagcttccaagaaggtgattggagggaagttcaaagggaagatttttttcattcactgtagttttagctgtattctttcatctgcaatcaaatctcaggattaaggatgtcgtattacatcaaatcattacaggaagtatgactgtatcagcggctttttacaaaaacaaacctccagatcacaaaaggaagctgtgtttgtgtactgacacgaagtgttacgtagcagccaggagaggaaggatagcagccgacttggatccatttttgaggaattatttctgtaaggtgtcatggaattgtaagttacaaaaataaggcttttgtaaacagaatctccattccagaaggacggactccaaaatgctacttaatgaaattcatgggaatgttatggtgatggaaatcccaaatgacatgtagattttatatgcaaacaatcccactgcttgtaactcctggcagtgtgtacttaccaaaatcttgatcacacttaggtctcttgctatatatagaaccacatctgatccttatacagtgttgcaagatatatgtccttgctttcccatggttcttaagtgagtcttaagcttggatttgctccagcagaatggtggtttgtgtttctcaaggctgagctactatttggtgcatgtcggaaatctcacactaactgtggatactctgtcatcactgaacccaatcatacaatgaccagacagctttaaatacctacttttgtatgctatgaattcatccgtttacttgtcaaatcctttatttccatatgtgtctccatcaccttttttttctctccggataaatggaattactgtaacttgtgaaacaatggcaaacactataaagctaattttacagtcttga

SEQ ID NO: 321 - protein, 375 aa, Homo sapiens
MDAIHIGMSSTPLVKHTAGAGLKANRPRVMSKSGHSNVRIDKVDGIYLLYLQDLWTTVIDMKWRYKLTLFAATFVMTWFLFGVIYYAIAFIHGDLEPGEPISNHTPCIMKVDSLTGAFLFSLESQTTIGYGVRSITEECPHAIFLLVAQLVITTLIEIFITGTFLAKIARPKKRAETIKFSHCAVITKQNGKLCLVIQVANMRKSLLIQCQLSGKLLQTHVTKEGERILLNQATVKFHVDSSSESPFLILPMTFYHVLDETSPLRDLTPQNLKEKEFELVVLLNATVESTSAVCQSRTSYIPEEIYWGFEFVPVVSLSKNGKYVADFSQFEQIRKSPDCTFYCADSEKQQLEEKYRQEDQRERELRTLLLQQSNV

SEQ ID NO: 322 - DNA, 97 bp, Homo sapiens
tggatcagattgcaaaattctgggaaattcaaggctcctctttaaagattcccaatgtggagcggaagatcttggacctctacagccttagtaagat

SEQ ID NO: 323 - DNA, 5595 bp, Homo sapiens
cattttaaaaaagatccggccatactatttttatcttgctttttcgttctgtcgcagtactgtttaatatgagtccagcgacggctctgtgactgttttcctctggtaaaatcgctcttgcgtcctcagcgtttatctcaggtgcggaaggtctcacaggtttggaaatagcgccggaaaaatcgatccgcggagtgagacggctcgtaccacactgcagggcccggaggtcaagatggtggctgtaaaactaggatccctgacgattgcttagcattaaggcccgacatggaaccggggtgtgacgagttcctgccgccaccggagtgcccggtttttgagcctagctgggctgaattccaagacccgcttggctacattgcgaaaataaggcccatagcagagaagtctggcatctgcaaaatccgcccacccgcggattggcagcctccttttgcagtagaagttgacaatttcagatttactcctcgcgtccaaaggctaaatgaactggaggcccaaactagagtgaaattgaactatttggatcagattgcaaaattctgggaaattcaaggctcctctttaaagattcccaatgtggagcggaagatcttggacctctacagccttagtaagattgtgattgaggaaggtggctatgaagccatctgcaaggatcgtcggtgggctcgagttgcccagcgtctccactacccaccaggcaaaaacattggctccctgctacgatcacattacgaacgcattatttacccctatgaaatgtttcagtctggagccaaccatgtgcaatgtaacacacacccgtttgacaatgaggtaaaagataaggaatacaagccccacagcatcccccttagacagtctgtgcagccttcaaagttcagcagctacagtcgacgggcaaaaaggctacagcctgatccagagcctacagaggaggacattgagaagcatccagagctaaagaagttacagatatatgggccaggtcccaaaatgatgggcttgggccttatggctaaggataaggataagactgtgcataagaaagtcacatgccccccaactgttacggtgaaggatgagcaaagtggaggtgggaacgtgtcatcaacattgctcaagcagcacttgagcctagagccctgcactaagacaaccatgcaacttcgaaagaatcacagcagtgcccagtttattgactcatatatttgccaagtatgctcccgtggggatgaagatgataagcttcttttctgtgatggctgtgatgacaattaccacatcttctgcttgttaccaccccttcctgaaatccccagaggcatctggaggtgcccaaaatgtatcttggcggagtgtaaacagcctcctgaagcttttggatttgaacaggctacccaggagtacagtttgcagagttttggtgaaatggctgattccttcaagtccgactacttcaacatgcctgtacatatggtgcctacagaacttgtagagaaggaattctggaggctggtgagcagcattgaggaagacgtgacagttgaatatggagctgatattcattccaaagaatttggcagtggctttcctgtcagcaatagcaaacaaaacttatctcctgaggagaagagacaaagtctcactgtgttgaccaggctgatctcaagcttctgggctcaagcagtcctcccaccttggcctcccaaagtgttgggattacaggagtatgcgaccagtggttggaacctgaatgtgatgccagtgctagatcagtctgttctctgtcacatcaatgcagacatctcaggcatgaaggtgccctggctgtacgtgggcatggttttctcagcattttgttggcatattgaggatcactggagttactctattaactatctgcattggggtgagccgaagacctggtatggtgtaccctccctggcagcagagcatttggaggaggtgatgaagatgctgacacctgagctgtttgatagccagcctgatctcctacaccagcttgtcactctcatgaatcccaacactttgatgtcccatggtgtgccagttgtccgcacaaaccagtgtgcaggggagtttgtcatcacttttcctcgtgcttaccacagtggttttaaccaaggctacaattttgctgaagctgtcaacttttgtactgctgactggctacctgctggacgccagtgcattgaacactaccgccggctccggcgctattgtgtcttctcccacgaggagctcatctgcaagatggctgccttcccagagacgttggatctcaatctagcagtagctgtgcacaaggagatgttcattatggttcaggaggagcgacgtctacgaaaggcccttttggagaagggcgtcacggaggctgagcgagaggcttttgagctgctcccagatgatgaacgccagtgcatcaagtgcaagaccacgtgcttcttgtcagccctggcctgctacgactgcccagatggccttgtatgcctttcccacatcaatgacctctgcaagtgctctagtagccgacagtacctccggtatcggtacaccttggatgagctccccaccatgctgcataaactgaagattcgggctgagtcttttgacacctgggccaacaaagtgcgagtggccttggaggtggaggatggccgtaaacgcagctttgaagagctaagggcactggagtctgaggctcgtgagaggaggtttcctaatagtgagctgcttcagcgactgaagaactgcctgagtgaggtggaggcttgtattgctcaagtcctggggctggtcagtggtcaggtggccaggatggacactccacagctgaccttgactgaactccgggtccttcttgagcagatgggcagcctgccctgtgccatgcatcagattggggatgtcaaggatgtcctggaacaggtggaggcctatcaagctgaggctcgtgaggctctggccacactgccctctagtccagggctattgcggtccctgttggagagggggcagcagctgggtgtagaggtgcctgaagcccatcagcttcagcagcaggtggagcaggcgcaatggctagatgaagtgaagcaggccctggccccttctgctcacaggggctctctggtcatcatgcaggggcttttggttatgggtgccaagatagcctccagcccttctgtggacaaggcccgggctgagctgcaagaactactgaccattgcagagcgctgggaagaaaaggctcatttctgcctggaggccaggcagaagcatccaccagccacattggaagccataattcgtgagacagaaaacatccctgttcacctgcctaacatccaggctctcaaagaagctctgactaaggcacaagcttggattgctgatgtggatgagatccaaaatggtgaccactacccctgtctagatgacttggagggcctggtggctgtgggccgggacctgcctgtggggctggaagagctgagacagctagagctgcaggtattgacagcacattcctggagagagaaggcctccaagacctttctcaagaagaattcttgctacacactgcttgaggtgctttgcccgtgtgcagacgctggctcagacagcaccaagcgtagccggtggatggagaaggcgctggggttgtaccagtgtgacacagagctgctggggctgtctgcacaggacctcagagacccaggctctgtgattgtggccttcaaggaaggggaacagaaggagaaggagggtatcctgcagctgcgtcgcaccaactcagccaagcccagtccactggcaccatccctcatggcctcttctccgacttctatctgtgtgtgtgggcaggtgccagctggggtgggagttctgcagtgtgacctgtgtcaggactggttccatgggcagtgtgtgtcagtgccccatctcctcacctctccaaagcccagtctcacttcatctccactgctagcctggtgggaatgggacacaaaattcctgtgtccactgtgtatgcgctcacgacggccacgcctagagacaatcctagccttgctggttgccctgcagaggctgcccgtgcggctgcctgagggtgaggcccttcagtgtctcacagagagggccattggctggcaagaccgtgccagaaaggctctggcctctgaagatgtgactgctctgttgcgacagctggctgagcttcgccaacagctacaggccaaacccagaccagaggaggcctcagtctacacttcagccactgcctgtgaccctatcagagaaggcagtggcaacaatatttctaaggtccaagggctgctggagaatggagacagtgtgaccagtcctgagaacatggctccaggaaagggctctgacctggagctactgtcctcactgttgccgcagttgactggccctgtgttggagctgcctgaggcaatccgggctcccctggaggagctcatgatggaaggggacctgcttgaggtgaccctggatgagaaccacagcatctggcagctgctgcaggctggacagcctccagacctggacagaattcgcacacttctggagctggaaaaatttgaacatcaagggagtcggacaaggagccgggctctggagaggcgacggcggcggcagaaggtggatcagggtagaaacgttgagaatcttgttcaacaggagcttcagtcaaaaagggctcggagctcagggattatgtctcaggtgggccgagaagaagaacattatcaggagaaagcagaccgtgaaaatatgttcctgacaccttccacagaccacagccctttcttgaaaggaaaccaaaatagcttacaacacaaggattcaggctcttcagctgcttgtccttctttaatgcctttgctacaactctcctactctgatgagcaacagttgtgacagtggcaccaaaggtcatttgtggttgtttttgtttgtttgtttcttaaatcctactatctcctggcctggacctcagaaggagctttttgcttatctataatttttcactgccaatttttgatatcctctctcctagagttactgttaaaaggttggttcgtaaagtccacaccccgatgctcagaagtgtcttgccagcaacattcctgctagcatacaggagtgatttcctaaaccagtttcattctagtctgaatagggacaaacaaatcttgaggaagcccaagtgcgtacctttatttttgcccccaccaccctctttctgtacttcaatttttgtttgttttttgtttttttgtccctgtcataaaatattttggtgcttcaaaacttgtaccttcattgtacatccttttcttttctccccttgggtcttattataaaagaagacaatgtacgttgtaattaccaaaaagaatagggaaaaacaagaatttcatgactctacctgtggtctatctttaatttcatttcttttgttaaaaataaaacaatgagtatgtttggatactatgaaaaaaaaaaaaaaaa

SEQ ID NO: 324 - protein, 1570 aa, Homo sapiens
MEPGCDEFLPPPECPVFEPSWAEFQDPLGYIAKIRPIAEKSGICKIRPPADWQPPFAVEVDNFRFTPRVQRLNELEAQTRVKLNYLDQIAKFWEIQGSSLKIPNVERKILDLYSLSKIVIEEGGYEAICKDRRWARVAQRLHYPPGKNIGSLLRSHYERIIYPYEMFQSGANHVQCNTHPFDNEVKDKEYKPHSIPLRQSVQPSKFSSYSRRAKRLQPDPEPTEEDIEKHPELKKLQIYGPGPKMMGLGLMAKDKDKTVHKKVTCPPTVTVKDEQSGGGNVSSTLLKQHLSLEPCTKTTMQLRKNHSSAQFIDSYICQVCSRGDEDDKLLFCDGCDDNYHIFCLLPPLPEIPRGIWRCPKCILAECKQPPEAFGFEQATQEYSLQSFGEMADSFKSDYFNMPVHMVPTELVEKEFWRLVSSIEEDVTVEYGADIHSKEFGSGFPVSNSKQNLSPEEKRQSLTVLTRLISSFWAQAVLPPWPPKVLGLQEYATSGWNLNVMPVLDQSVLCHINADISGMKVPWLYVGMVFSAFCWHIEDHWSYSINYLHWGEPKTWYGVPSLAAEHLEEVMKMLTPELFDSQPDLLHQLVTLMNPNTLMSHGVPVVRTNQCAGEFVITFPRAYHSGFNQGYNFAEAVNFCTADWLPAGRQCIEHYRRLRRYCVFSHEELICKMAAFPETLDLNLAVAVHKEMFIMVQEERRLRKALLEKGVTEAEREAFELLPDDERQCIKCKTTCFLSALACYDCPDGLVCLSHINDLCKCSSSRQYLRYRYTLDELPTMLHKLKIRAESFDTWANKVRVALEVEDGRKRSFEELRALESEARERRFPNSELLQRLKNCLSEVEACIAQVLGLVSGQVARMDTPQLTLTELRVLLEQMGSLPCAMHQIGDVKDVLEQVEAYQAEAREALATLPSSPGLLRSLLERGQQLGVEVPEAHQLQQQVEQAQWLDEVKQALAPSAHRGSLVIMQGLLVMGAKIASSPSVDKARAELQELLTIAERWEEKAHFCLEARQKHPPATLEAIIRETENIPVHLPNIQALKEALTKAQAWIADVDEIQNGDHYPCLDDLEGLVAVGRDLPVGLEELRQLELQVLTAHSWREKASKTFLKKNSCYTLLEVLCPCADAGSDSTKRSRWMEKALGLYQCDTELLGLSAQDLRDPGSVIVAFKEGEQKEKEGILQLRRTNSAKPSPLAPSLMASSPTSICVCGQVPAGVGVLQCDLCQDWFHGQCVSVPHLLTSPKPSLTSSPLLAWWEWDTKFLCPLCMRSRRPRLETILALLVALQRLPVRLPEGEALQCLTERAIGWQDRARKALASEDVTALLRQLAELRQQLQAKPRPEEASVYTSATACDPIREGSGNNISKVQGLLENGDSVTSPENMAPGKGSDLELLSSLLPQLTGPVLELPEAIRAPLEELMMEGDLLEVTLDENHSIWQLLQAGQPPDLDRIRTLLELEKFEHQGSRTRSRALERRRRRQKVDQGRNVENLVQQELQSKRARSSGIMSQVGREEEHYQEKADRENMFLTPSTDHSPFLKGNQNSLQHKDSGSSAACPSLMPLLQLSYSDEQQL

SEQ ID NO: 325 - DNA, 109 bp, Homo sapiens
aggacccctatgaggtgggccacagcatggccttccgagtgcatttattctataagaacgggcagcctttccctgcacatcggcctgtgggactaagagttcacatctc

SEQ ID NO: 326 - DNA, 5417 bp, Homo sapiens
aatcccccgagccggttcccaggccgggtggagaccaactctggggtctgttggtgggagagtggggagcccgtcttctgctgagtgctgccgccccttcccaggacagcggaggtggaacttcgtcgcgctgcaacccccggctcgggatcctggggcgtcctttggcagtcgattgcaccctgcactagagagaagtccaggaatgatatattcttgggctgtatttctctaccctggagttcatccagttcatcccagaaacactgacctgattactgtgacaaagtctgatggatagaccctttctgttgaccttgtggcgtttttctttcatgtggaagttggaagacaaggtgaaaggggccaaaagttacctgctttggtgaataggagtgctctacttggttctcagaacatgggccctcgtttaaagctgcagctgtgatcctcggctgtctgttggcattgacgggacctgatgttttacgttattggtggaatcacagtgtctgtggttgcattcttcttcacaattaagttcctctttgagcttgccgcacgtgtagtcagcttcctccagaatgaggaccgcgagcgccgaggggaccggactatttatgactacgtgcggggaaattacctggatccccggtcttgcaaagtctcctgggattggaaggacccctatgaggtgggccacagcatggccttccgagtgcatttattctataagaacgggcagcctttccctgcacatcggcctgtgggactaagagttcacatctctcatgtcgagctagcagtggaaattccagtgacccaggaagtccttcaggagcccaattccaacgtagtaaaagtggccttcactgtgcgcaaggctgggcgttatgaaatcacagtgaagcttggtggattaaatgtggcatatagtccctactacaaaatttttcaacctggaatggtggttccttctaagaccaaaattgtgtgccacttttctactcttgtattgacctgtgggcagccgcacacccttcaaatagtaccccgagatgagtatgataatcccaccaacaattccatgtccttgagagatgagcacaattacaccttgtccattcatgagctcggccctcaagaagaagagagtactggtgtctcatttgagaaatcagtaacatccaacaggcagactttccaggtgttcttgcgactcaccctgcattctcgaggctgcttccatgcttgcatttcataccaaaatcagccaatcaataatggtgaatttgacattattgtcctaagtgaggatgagaagaatatcgtcgaacgcaatgtgtccacttcaggcgtgagcatttactttgaggcttatctttataatgctaccaactgtagcagcactccatggcacctgccacccatgcacatgacctcttcccagcgccggccatccactgctgttgacgaggaagatgaagactcgccctctgagtgccacacccctgagaaggtgaagaaaccgaagaaggtgtactgctatgtgtcaccaaagcaattctcagtgaaggagttctacctgaagatcatcccctggcgcctttacaccttccgagtgtgtccaggaacaaaattttcataccttggtcctgaccctgtccataagctgctcacactggtggtggatgatggcattcaacctcctgtggagctcagctgtaaggagaggaacattctagcagccacttttatccgctccctgcataagaacataggaggctctgagacctttcaggacaaggtgaactttttccagcgagagcttcggcaggtacatatgaaaagaccacattccaaagtcaccctgaaggtcagcagacatgccttgttggaatcgtctctgaaagccactcggaatttctccatctcagattggagcaagaactttgaggttgttttccaggatgaagaagctctggactggggagggcctcgccgggaatggtttgagctaatctgcaaagcactatttgataccaccaatcagctcttcacccggttcagtgacaacaaccaagcattagtgcatcccaaccctaatcgccccgctcatctgcgcctgaaaatgtatgagtttgcgggacggctcgtgggcaagtgtctctatgagtcctctctaggaggagcctacaagcagttggtccgagctcgcttcacccgctctttcctggcccaaatcataggactgcgtatgcattacaagtactttgaaacagatgacccagaattctacaaatctaaagtttgttttatcctcaacaatgacatgagtgagatggagctggtctttgcagaagagaaatataataaatcaggtcaattggataaggttgtagaactcatgacaggtggagctcaaactccagtcaccaatgcgaataaaatcttctatttaaatttgctggcccaatatcggctggccagtcaagtgaaagaggaggtggaacatttcctaaaaggcctgaatgaattggtccctgagaaccttttggctatttttgatgagaatgagcttgagctgctgatgtgtgggactggagacatcagtgtgtctgacttcaaagcccatgcagtagttgttggtggctcatggcatttcagagaaaaggtcatgaggtggttttggactgtggtttccagtctgacccaggaggagttggctcggctacttcagttcacaacaggctcctctcagctaccacctggaggctttgccgccctctgtccctcatttcagattattgccgctccgacccatagcacgctgcctactgcacacacatgttttaaccagctgtgcctccctacatatgactcctatgaagaggtgcacaggatgctgcagctggccatcagcgagggttgcgagggctttggcatgctctgaccactctcctgtcatccagttggctcccatgctctctggagcttctgggcgcaagttacagacatcataaccactgatcctaacacacataaccatcagccagaagatgccgcatgctcccctgtgtctggaggattttgtcacctacaagccttgtctttacctcacctgctccctgcccatatctaccacaggccactttggcatggtatgtaagctgagctcttcattctgtcatgagaagaggaccatgctgctatcatttatttggtcctttgaagatctcagtagctgagggagatggcacacggggctcagccctgttgggaaactggtgtggagacccttaaatccacactgtgctccaaaactccctctgctgatactccttggagacaccctctttggccctcactacttgaccagactggtacttgagtccttctcatgggtggggtgattgcctcttctcatcaggagccaggagagagggggacagataggaggtggcccataggagcagtcccgctgcacaatggtaggcataggccatggcactggactgcctctaaggactgctaaaaagaatatttttttgtggtgtcagaactggaaaaagcactttcccttcgggcatttctggaaatgattattaatccacaaagaagaactctgtaagctttttcttgaattgtagccagtgagaaaagcagatagactgaagaatatgaaggatagctgagctgtagcctccagagtggggcatgcctaggcatatggctggcttggagactactgatgcttttccctgagtttgttattggcactgaagtatggccggcttgggccactgacttccccattatgtagtctgctaaaagctggggatcctttagcattctactgaagaaaattttgtagcaaaagattagaacagtaagaatagtatgccagcaatccctgattctctctctgcttggtgttctctggcagcactaagacaaaggaacagggactaggagtttacgtgcttatcacaggtccttggcgtcaggacactagggatgaacatggaggtgatatgttacacagtaaacacctgccaacccctgtactcccctttgctccatcagttatcaggaaggagaactaaggagggaggaagcttattaggttcactgttgaatgatgattgaagagtacctgctgctgtatcttggaagatgacaacatcctttttcattactgtttgattgaaaataatttcaagattcaaaatctcattgacttcccaaatttgtgtttttaagaaggctttgctgcaagctaccattcccaatggggcagtcaactctgagaatattacaagccatctttattgccaaaaccagcaagtacacagagtcctgaaacaaggcaggactttggcaatgccttggcctcctggaagcatgtctgagccctcctgttcgcagggatcatgaggaacaagccctcctgagctgctacagttcctgcctgacctcagtctttcgcagtcatcatttgtcctttcttggcacatgggtgctgacctcactcatccttggggtccgggatccagcatcagggtctctataccccaggatcctccatgccacatggtcactgctctcctcagggaccaggacaaggtgctgctgcttgcccaaatgttttcccatgggatatgtaccggaaggtttatcaccaccctgggaaacataatgctgccccttgggcccagaaaggggtttccagctgggggcacgtggactggttctgctgtttttggcagtcgcttttctgaattctcccctccggcagccttccagagactgatcctggagattgagttgattgtcttggctagacctgtcattttaagctctagtcatagcactttttcagagcatcttaggcaccattgcaacccaaccagggaagctgcatccctgtggtggtccttaggcaccagtctttgttaaacaaaaccctttggcactattgtggttttctattctctgtctgaactctattcaaaagtatctttgctctcttgggccttttcttttactgttttgttttttttttttctaatcctgctttcatactagccagtgtggggaaaaggtacaatatgtcaaagagatgagagagtgttatttcttgggcaattttctattagtgtttcttattttggccagttcttttatttatgtccttgtgacccaggtacttggggggccagctacccttctggccttttagcgtctttgaaggagaccagacatgagtgaatacctaggagagtgtcagcatgtttctggaaaattggcagagaccaagccctgctgcagattcgtcaggccaggtgaaagggccaggcagttgcagctgatgatgtaaatattttgtacagtagataaataaatgtttaaaagaa

SEQ ID NO: 327 - protein, 823 aa, Homo sapiens
MFYVIGGITVSVVAFFFTIKFLFELAARVVSFLQNEDRERRGDRTIYDYVRGNYLDPRSCKVSWDWKDPYEVGHSMAFRVHLFYKNGQPFPAHRPVGLRVHISHVELAVEIPVTQEVLQEPNSNVVKVAFTVRKAGRYEITVKLGGLNVAYSPYYKIFQPGMVVPSKTKIVCHFSTLVLTCGQPHTLQIVPRDEYDNPTNNSMSLRDEHNYTLSIHELGPQEEESTGVSFEKSVTSNRQTFQVFLRLTLHSRGCFHACISYQNQPINNGEFDIIVLSEDEKNIVERNVSTSGVSIYFEAYLYNATNCSSTPWHLPPMHMTSSQRRPSTAVDEEDEDSPSECHTPEKVKKPKKVYCYVSPKQFSVKEFYLKIIPWRLYTFRVCPGTKFSYLGPDPVHKLLTLVVDDGIQPPVELSCKERNILAATFIRSLHKNIGGSETFQDKVNFFQRELRQVHMKRPHSKVTLKVSRHALLESSLKATRNFSISDWSKNFEVVFQDEEALDWGGPRREWFELICKALFDTTNQLFTRFSDNNQALVHPNPNRPAHLRLKMYEFAGRLVGKCLYESSLGGAYKQLVRARFTRSFLAQIIGLRMHYKYFETDDPEFYKSKVCFILNNDMSEMELVFAEEKYNKSGQLDKVVELMTGGAQTPVTNANKIFYLNLLAQYRLASQVKEEVEHFLKGLNELVPENLLAIFDENELELLMCGTGDISVSDFKAHAVVVGGSWHFREKVMRWFWTVVSSLTQEELARLLQFTTGSSQLPPGGFAALCPSFQIIAAPTHSTLPTAHTCFNQLCLPTYDSYEEVHRMLQLAISEGCEGFGML

SEQ ID NO: 328 - DNA, 106 bp, Homo sapiens
caaaggcagccccaatgcaaacgaaccacccctggtgtttgttgggaaaggaattacctttgacagtggtggtatctccatcaaggcttctgcaaatatggacctc

SEQ ID NO: 329 - DNA, 2100 bp, Homo sapiens
ctgcccatccgtcccgccccctagacgcacgtccgctcgcccggcgcccgagccagtccgcgcgcacgccgtctgcgccccgaaagccccgccccaaggcgcgcccgcccaccgctctccacgtgctcgctggagggcggtgcgaggggccgagccgacaagatgttcttgctgcctcttccggctgcggggcgagtagtcgtccgacgtctggccgtgagacgtttcgggagccggagtctctccaccgcagacatgacgaagggccttgttttaggaatctattccaaagaaaaagaagatgatgtgccacagttcacaagtgcaggagagaattttgataaattgttagctggaaagctgagagagactttgaacatatctggaccacctctgaaggcagggaagactcgaaccttttatggtctgcatcaggacttccccagcgtggtgctagttggcctcggcaaaaaggcagctggaatcgacgaacaggaaaactggcatgaaggcaaagaaaacatcagagctgctgttgcagcggggtgcaggcagattcaagacctggagctctcgtctgtggaggtggatccctgtggagacgctcaggctgctgcggagggagcggtgcttggtctctatgaatacgatgacctaaagcaaaaaaagaagatggctgtgtcggcaaagctctatggaagtggggatcaggaggcctggcagaaaggagtcctgtttgcttctgggcagaacttggcacgccaattgatggagacgccagccaatgagatgacgccaaccagatttgctgaaattattgagaagaatctcaaaagtgctagtagtaaaaccgaggtccatatcagacccaagtcttggattgaggaacaggcaatgggatcattcctcagtgtggccaaaggatctgacgagcccccagtcttcttggaaattcactacaaaggcagccccaatgcaaacgaaccacccctggtgtttgttgggaaaggaattacctttgacagtggtggtatctccatcaaggcttctgcaaatatggacctcatgagggctgacatgggaggagctgcaactatatgctcagccatcgtgtctgctgcaaagcttaatttgcccattaatattataggtctggcccctctttgtgaaaatatgcccagcggcaaggccaacaagccgggggatgttgttagagccaaaaacgggaagaccatccaggttgataacactgatgctgaggggaggctcatactggctgatgcgctctgttacgcacacacgtttaacccgaaggtcatcctcaatgccgccaccttaacaggtgccatggatgtagctttgggatcaggtgccactggggtctttaccaattcatcctggctctggaacaaactcttcgaggccagcattgaaacaggggaccgtgtctggaggatgcctctcttcgaacattatacaagacaggttgtagattgccagcttgctgatgttaacaacattggaaaatacagatctgcaggagcatgtacagctgcagcattcctgaaagaattcgtaactcatcctaagtgggcacatttagacatagcaggcgtgatgaccaacaaagatgaagttccctatctacggaaaggcatgactgggaggcccacaaggactctcattgagttcttacttcgtttcagtcaagacaatgcttagttcagatactcaaaaatgtcttcactctgtcttaaattggacagttgaacttaaaaggtttttgaataaatggatgaaaatcttttaacggagacaaaggatggtatttaaaaatgtagaacacaatgaaatttgtatgccttgatttttttttcatttcacacaaagatttataaaggtaaagttaatatcttacttgataaggatttttaagatactctataaatgattaaaatttttagaacttcctaatcacttttcagagtatatgtttttcattgagaagcaaaattgtaactcagatttgtgatgctaggaacatgagcaaactgaaaattactatgcacttgtcagaaacaataaatgcaacttgttgtg

SEQ ID NO: 330 - protein, 519 aa, Homo sapiens
MFLLPLPAAGRVVVRRLAVRRFGSRSLSTADMTKGLVLGIYSKEKEDDVPQFTSAGENFDKLLAGKLRETLNISGPPLKAGKTRTFYGLHQDFPSVVLVGLGKKAAGIDEQENWHEGKENIRAAVAAGCRQIQDLELSSVEVDPCGDAQAAAEGAVLGLYEYDDLKQKKKMAVSAKLYGSGDQEAWQKGVLFASGQNLARQLMETPANEMTPTRFAEIIEKNLKSASSKTEVHIRPKSWIEEQAMGSFLSVAKGSDEPPVFLEIHYKGSPNANEPPLVFVGKGITFDSGGISIKASANMDLMRADMGGAATICSAIVSAAKLNLPINIIGLAPLCENMPSGKANKPGDVVRAKNGKTIQVDNTDAEGRLILADALCYAHTFNPKVILNAATLTGAMDVALGSGATGVFTNSSWLWNKLFEASIETGDRVWRMPLFEHYTRQVVDCQLADVNNIGKYRSAGACTAAAFLKEFVTHPKWAHLDIAGVMTNKDEVPYLRKGMTGRPTRTLIEFLLRFSQDNA

SEQ ID NO: 331 - DNA, 109 bp, Homo sapiens
ccctgtaatttcacagccccagttcacagccatgaatgaaccacagtgcttctacaacgagtccattgccttcttttataaccgaagtggaaagcatcttgccacagaa

SEQ ID NO: 332 - DNA, 3563 bp, Homo sapiens
acatttccggggttttgcgggccccgcgatgttttccagagcttttcgagtgggaagaggagagcgacaacgtgaaaatgccccgtgccggggcgtccaccggagtcctgccagctgtccggcgctggggtggacgtctgatttatgaagctccccatccacctatctgagtacctgacttctcaggactgacacctacagcatcaggtacacagcttctcctagcatgacttcgatctgatcagcaaacaagaaaatttgtctcccgtagttctggggcgtgttcaccacctacaaccacagagctgtcatggctgccatctctacttccatccctgtaatttcacagccccagttcacagccatgaatgaaccacagtgcttctacaacgagtccattgccttcttttataaccgaagtggaaagcatcttgccacagaatggaacacagtcagcaagctggtgatgggacttggaatcactgtttgtatcttcatcatgttggccaacctattggtcatggtggcaatctatgtcaaccgccgcttccattttcctatttattacctaatggctaatctggctgctgcagacttctttgctgggttggcctacttctatctcatgttcaacacaggacccaatactcggagactgactgttagcacatggctccttcgtcagggcctcattgacaccagcctgacggcatctgtggccaacttactggctattgcaatcgagaggcacattacggttttccgcatgcagctccacacacggatgagcaaccggcgggtagtggtggtcattgtggtcatctggactatggccatcgttatgggtgctatacccagtgtgggctggaactgtatctgtgatattgaaaattgttccaacatggcacccctctacagtgactcttacttagtcttctgggccattttcaacttggtgacctttgtggtaatggtggttctctatgctcacatctttggctatgttcgccagaggactatgagaatgtctcggcatagttctggaccccggcggaatcgggataccatgatgagtcttctgaagactgtggtcattgtgcttggggcctttatcatctgctggactcctggattggttttgttacttctagacgtgtgctgtccacagtgcgacgtgctggcctatgagaaattcttccttctccttgctgaattcaactctgccatgaaccccatcatttactcctaccgcgacaaagaaatgagcgccacctttaggcagatcctctgctgccagcgcagtgagaaccccaccggccccacagaaggctcagaccgctcggcttcctccctcaaccacaccatcttggctggagttcacagcaatgaccactctgtggtttagaacggaaactgagatgaggaaccagccgtcctctcttggaggataaacagcctccccctacccaattgccagggcaaggtggggtgtgagagaggagaaaagtcaactcatgtacttaaacactaaccaatgacagtatttgttcctggaccccacaagacttgatatatattgaaaattagcttatgtgacaaccctcatcttgatccccatcccttctgaaagtaggaagttggagctcttgcaatggaattcaagaacagactctggagtgtccatttagactacactaactagacttttaaaagattttgtgtggtttggtgcaagtcagaataaattctggctagttgaatccacaacttcatttatatacaggcttcccttttttatttttaaaggatacgtttcacttaataaacacgtttatgcctatcagcatgtttgtgatggatgagactatggactgcttttaaactaccataattccattttttcccttacataggaaaactgtaagttggaattatcttttgtttagaaagcatgcatgtaatgtatgtatgcagtatgccttacttaaaaagattaaaaggatactaatgttaaatcttctaggaaatagaacctagacttcaaagccagtatttgtttaggtcatgaagcaaacaatgctctaatcacaatattaactgtttaattaaaatgttgtaacaagtataaaacagggaatgtaagtttattaccaaagtgatatgtattccaaaaaagtcatagaagatgaagcactataatattgttcccatatatttaaaatacccaagtacattctaattaccagtatatcagaggaaaattttcgtagtctttgtaaaataatatactcatcatagaaaacttgaaaaatgcagaaatgtataaaaaagcaaaaatgattactgataatatcacaacccagaagtaaccacctttaaaaagcaacccccatgtatgcctatatgtgtattgtatactttttttacataattggagtcatactgtaaacagttttataagtagatctttttcattgcaaaattgccacattttcttatggcattaaaaattttacaaaaacataattttaatggctatattatattccatttaatggatgcaactcagtttatttaaccattcccatgttgttaactatttaggttgtttctaattttcattattataaagttgcagaaatttggtgtacataaaactgtctccatataattgattattaggatatattcccatgaaggattctttttttaaaaaaatgtgaaatgtcatcttgtacttacacctttcatgaaaagggatttcctgcttttgtactgcatgggtggcagttgtgaggaaaagccagtcaaatgacctttttacaaaagaaatgcagtggtcacttcagttgagagtgactttttaatacaacaagatcaactagaagaattcaactgtctcaagaatcaaggtaccccaatatatctcgcaattccaaactttgtttgagggactcgttatccagctcttggtagccacacctgcaatgtaaaatggaagaaaatgcaaagaaaccaaatgtgccgagtgaataaaggattgtcatatcaattagtgtgggtccatctgtagcaaatgggttgagtgtgtcagtatgtggttggttactgtgtattcgccaggaatcaccccgataggctgccaccctattaggtgatacctgtttaatatgttgtccaggtagactagtagttgcatcagtttgctgtaacaagtaaccagtgaggtaacacagtggtgaagcaggtcaggggaggtcaggaggatgtctgagagaaagaagtccgggagatgaatggctgtctaggaaggaggatgtcagtgcacggttagtgtttgagcagagggcagacttgtaaagtacctgtagtgaaaagaatgtggggacccgattagcagaaaggtgtttgcacgtactttatacaaaatacagaatactttatattggaagtgaaagaaatgaacgtggacttttacacatgtgcatatttttctggaggctatatggattatttgaaatgaaaagcatactaattggactttaataaatcattttcaatca

SEQ ID NO: 333 - protein, 364 aa, Homo sapiens
MAAISTSIPVISQPQFTAMNEPQCFYNESIAFFYNRSGKHLATEWNTVSKLVMGLGITVCIFIMLANLLVMVAIYVNRRFHFPIYYLMANLAAADFFAGLAYFYLMFNTGPNTRRLTVSTWLLRQGLIDTSLTASVANLLAIAIERHITVFRMQLHTRMSNRRVVVVIVVIWTMAIVMGAIPSVGWNCICDIENCSNMAPLYSDSYLVFWAIFNLVTFVVMVVLYAHIFGYVRQRTMRMSRHSSGPRRNRDTMMSLLKTVVIVLGAFIICWTPGLVLLLLDVCCPQCDVLAYEKFFLLLAEFNSAMNPIIYSYRDKEMSATFRQILCCQRSENPTGPTEGSDRSASSLNHTILAGVHSNDHSVV

SEQ ID NO: 334 - DNA, 105 bp, Homo sapiens
cctcaacctcatcgacatgtgcttgagatatcaaggcaacatgagcagccagggcaaggaatagcaccagatgcagttaatggacaaaggagggattccagatct

SEQ ID NO: 335 - DNA, 9914 bp, Homo sapiens
agggaaacttggaggctgcgaccagggtttggcgttgttgtcagcctcggggagagagattggacaaatattctccaagaggaggagggcgacgccaaggactttccacatcaactgctttggggtatctccacaagttggaagagggaccctttcgttttgcattgcgtgtgttgtgctcattaccagtgcagcgactgccgtcccagggtgactctgagttgtcctttatcgtgagctagcaatggctagcgaagacaatcgtgtcccttccccgccaccaacaggtgatgacgggggaggtggagggagagaagaaacccctactgaagggggtgcattgtctctgaaaccagggctccccatcaggggcatcagaatgaaatttgccgtgttgaccggtttggttgaagttggagaagtatccaatagggatattgtagaaactgtctttaacctgttggtaggaggacagtttgatctggaaatgaatttcattatccaagaaggtgagagtattaactgcatggtggacctactggaaaaatgtgacattacgtgccaagcagaagtctggagcatgtttacagccattctgaagaaaagcatacggaatcttcaagtctgcactgaagtaggccttgttgaaaaagtgcttgggaaaattgaaaaagttgacaatatgatagcagatcttttggttgacatgttgggagtgctggctagctataatttgacagttcgcgagctaaagcttttcttcagtaaacttcaaggagataaaggacgatggcctccacatgctgggaagttgctgtctgtgttaaagcatatgcctcagaagtatggtcctgatgccttttttaactttccaggaaagagtgctgcagctattgcattacctcctatagccaaatggccataccagaatggttttacatttcatacatggcttagaatggatcctgtaaataacatcaatgtagataaggataaaccatatttgtattgtttcagaaccagcaaaggtcttggctattctgctcattttgttggaggctgtttgattgtaacatcaataaagtcaaaaggaaaaggctttcaacactgtgtgaaatttgatttcaagccacaaaagtggtatatggttaccatagtacacatctataaccgatggaagaatagtgaacttcgatgttatgtgaatggtgagctggcttcctatggagagataacatggtttgtcaacactagcgatacctttgacaaatgtttcctgggctcatcagaaacagcagatgctaatagagtattctgtggtcagatgactgcagtttaccttttcagtgaagctctaaatgcagctcagatatttgctatttatcagttgggcctgggatacaagggtacatttaaattcaaagcagaaagcgaccttttccttgctgagcatcacaaacttttattgtacgatgggaaactctctagtgccattgcattcacgtacaatccacgggctacagatgcccagctttgtcttgaatcatctcctaaggacaacccttcaatttttgttcattcaccacatgcactcatgctccaggatgtaaaggcagttttaacacattccatccaaagtgcaatgcattcaattggaggagtacaagtactatttccactttttgcacagttggattacaggcaatatttgtctgatgagattgatttgactatatgttcaaccttgctggcctttatcatggaattgttgaagaactcaattgctatgcaggaacagatgcttgcctgtaagggcttcttggtaataggatatagccttgaaaagtcttccaaatctcatgttagcagagcagtacttgaactttgccttgcattttcaaaatatctgagtaatctgcagaatgggatgcccctgctcaagcaattgtgtgatcacgttcttcttaatcctgccatatggattcataccccagccaaggttcaactgatgctctatacttatctgtccacggaattcattggtacagtcaacatatataacaccattcggagagttggaacagtgcttctcatcatgcacacgctgaagtactactactgggcagtgaatcctcaggatcgaagtggtatcaccccaaaaggattagatggaccgcgacctaatcaaaaagaaatgctttctctacgagcattcttgttgatgttcattaagcaattagtgatgaaggattctggagtaaaggaagatgaattacaggccattcttaattacctactgactatgcatgaggatgacaatctaatggatgtcctacagctgcttgttgcattaatgtcagaacaccctaactctatgattcctgcttttgaccaaaggaatgggttacgtgttatctacaaacttctggcatcgaaaagtgaaggaatcagggtacaagctcttaaggcaatgggttattttttaaaacatctggccccaaagaggaaagcagaagtcatgcttggacatggattgttttcattgctagctgaaaggctcatgcttcagacaaatttaatcacaatgaccacatataatgtgctgtttgagattcttatagaacagattggtactcaggtgatacataaacagcatccagatcctgattcttcagtgaagatacaaaaccctcagatactaaaagtaattgcgaccctacttcgaaattctccccagtgcccagagagcatggaggttcgcagagcctttctttctgacatgattaaactttttaataacagtagagaaaacaggaggagcttgctacaatgctctgtgtggcaagaatggatgctttctctctgctattttaatcctaagaattcagatgagcaaaagataacagaaatggtatacgccatattcagaatcctgctttaccatgcagtcaaatatgagtggggtggctggcgtgtatgggtagacactttatcaatcactcattcaaaggtcacttttgaaatacacaaagaaaaccttgccaatatatttagggaacagcaaggaaaagttgatgaagaaatagggctgtgttcttcaacttcagttcaagcagcctctggcattagaagggatattaatgtttcagtaggatcccagcaaccagatacgaaggattctcctgtctgtcctcatttcaccacaaatggtaatgaaaattcaagtatagagaagacaagttcactagaatctgcatctaatattgaactgcaaactactaatacatcttatgaagaaatgaaagctgagcaagaaaatcaggagttaccagatgaaggcactttggaagaaacactgacaaatgagacaaggaatgcagatgatttagaagtatcttctgacataatagaagctgtggctatttcctctaattcttttataacaactggcaaagattcaatgactgtcagtgaagtaactgcttctataagttctccttcagaagaggatgcctcagagatgccagaattcttggataaatctatagtagaggaagaggaagatgatgattatgtggaactgaaagtagaaggcagtcctactgaggaagctaatctacccacagagctccaagataacagtttgtctccagctgcatctgaagccggtgaaaaactggacatgtttggtaatgatgacaaattaatatttcaagaaggaaaacctgttactgaaaagcaaactgatactgaaactcaagattctaaagattctggaattcagactatgacagcatcagggtcttcagctatgtcaccagaaactactgtttcccaaatagctgtagaatcagaccttggtcagatgctggaggaagggaagaaagcaactaacctcactagagaaaccaaattaattaatgattgtcatggtagtgtctctgaggcttcttctgagcaaaagattgcgaagttggatgtttccaatgttgctacagatactgagaggctggagttgaaggccagtcccaacgtggaagcacctcaacctcatcgacatgtgcttgagatatcaaggcaacatgagcagccagggcaaggaatagcaccagatgcagttaatggacaaaggagggattccagatctactgtgtttcgtattcctgagttcaactggtctcagatgcatcaacgtttgctcactgatctattattttcaatagaaacagatatacagatgtggagaagccattcaacaaagacagttatggacttcgtgaatagcagtgataatgtcatctttgtacacaacacaattcatctcatctctcaagtgatggacaatatggtcatggcttgtgggggtatactgccattgctttcagctgctacatcggctacacatgaactggaaaatattgaacctactcaaggcctttcaatagaagcctctgtgacatttttgcagaggctaattagccttgtggatgtgcttatatttgcaagttctcttggctttactgaaattgaagctgaaaaaagtatgtcatctggaggaattttgcggcagtgtctccgactagtttgtgcagtcgcagtaaggaattgcttggagtgtcaacagcattcacaactgaaaactaggggagataaagccttgaaaccaatgcatagccttattcctttagggaaatctgcagcgaagagcccagtggacattgtgactggcggtatatctccagtaagagatcttgacaggcttctacaggacatggatattaatcggcttagggcagttgttttcagagacatagaggatagcaaacaagctcaatttttagccttggcagtagtatactttatctctgttcttatggtctccaagtacagagacattttggaaccccaaaatgaaaggcatagccagtcatgtacagaaactggcagtgaaaatgagaatgtatcactctctgaaatcacaccagcagcattcagcactttaactacggcatcagtggaagaatctgaaagcacatcatctgctcgaaggagggactcaggcattggggaagaaacagccactggtttaggaagccatgtggaagtaactcctcacacagcacctcctggtgtcagtgcaggcccagatgcaatcagcgaggtgctatctactctttctttagaagtcaataagtctccggaaaccaaaaatgatagaggaaatgacttggacactaaggctacaccgtcagtttcagtttcaaaaaacgtcaatgtgaaagacattctccgaagcttggttaacataccagcagatggagtcacagtggatcctgcccttctgccaccagcctgccttggagcccttggtgatctatctgtggaacaacccgtgcagttcagatcttttgacagaagtgtcattgttgcagcaaaaaagtcagcagtctcaccttccacctttaatacaagcatacctaccaatgctgtcagtgtggtttcctcagtagattcagcccaagcctcagatatgggaggagaatcaccaggcagtagatcatctaatgcaaaattgccctcagttccaacagttgattcagtttcacaagatccggtttcaaatatgagtattacagagaggcttgaacacgctttggaaaaggcagctcctctccttcgtgagatttttgtggattttgcaccttttctttctcggacacttttgggtagccatggacaagaactgcttatagaaggaacaagtctggtttgcatgaagtcgagtagttcagttgtggaattggttatgctactgtgttctcaggagtggcaaaattctattcagaagaatgcaggccttgcttttatcgaacttgtcaatgaaggaaggttgcttagccagacaatgaaggatcatctagtaagagtagcaaatgaagctgaatttatcctgagcaggcagagagcagaagatattcacagacatgcggaatttgagtcactgtgtgcccagtattctgcagacaaacgagaagatgagaagatgtgtgatcatttgataagagcagcaaaatatcgtgaccacgtgacagcaactcaactaatccagaaaattatcaacattctcacagacaagcatggagcctggggaaattctgcagtgagtcgtcctcttgagttctggcgccttgactactgggaagatgacttgcggcgccggcgacgatttgtgcgtaaccctctaggatcgacacatcctgaagcgacactaaaaacagccgtggaacatgtgtgcatttttaaattgagagagaacagcaaagccacagatgaagatatccttgctaaaggaaaacagtccatcaggagtcaggctttaggaaatcagaactcagaaaacgagatcctcctggaaggcgatgatgatactctgtcatccgtggatgagaaagatttagagaatcttgccggtcctgttagcctgagcacaccagctcagcttgtggccccctctgttgtagtaaagggcactctttctgtcacctcctccgaactctattttgaggtggatgaagaggatcctaacttcaaaaaaatcgaccccaagatcttggcatatacagaagggctgcatggaaaatggctgttcacagagatacgatcaatcttttctcgtcgttatcttttgcaaaatacagccctggagatctttatggcaaacagagttgctgtgatgttcaacttcccagaccctgcaacagtaaagaaagtggttaactatctacctcgtgttggcgttggaacaagttttggattgcctcaaaccagacgtatttcattagctagtccacgtcagctttttaaggcttctaatatgacccagcgatggcaacacagagagatatctaattttgagtacttgatgtttctcaacacgatagcaggacggagttataatgacttaaatcagtatccagtgtttccttgggtcatcactaattatgaatcagaagaactggatcttaccttgcccaccaacttcagagatttgtccaagccaataggagctctgaacccaaaaagagcagcattcttcgctgagcgttatgaatcatgggaagatgatcaagttccaaagtttcactatggtactcattactcaactgcaagttttgttcttgcatggctgctaagaatagaaccctttacaacttatttcctaaatttgcaaggaggcaaatttgatcatgcagatcgaactttttcatcaatttccagagcttggcgaaacagtcagcgtgatacctctgatattaaggagttgatccctgaattttattatctccctgagatgtttgtcaacttcaataattataatcttggagtgatggatgatgggacagtagtgtctgatgtcgaacttcctccttgggccaaaacctcagaagaatttgttcacataaacagattggccctggagagtgaatttgtttcctgccagcttcaccaatggattgatctcatttttggctataaacagcaaggaccagaagctgtccgagccctcaatgtgttctattacttgacctatgaaggagctgtcaatctgaattcaataactgatcctgtgttgagagaggctgttgaagctcaaatccgaagttttggacagactccttctcaactactcatagagccccatcctcccagaggttctgccatgcaagtgagtccattgatgttcacagacaaagcccagcaggatgttatcatggtcctcaagtttccctccaactcccctgttactcacgtggcagccaacacccagcctggtttggcaactcccgctgtgatcacagtcactgctaacaggttatttgcggtgaacaaatggcacaaccttcctgctcatcaaggtgctgtacaagaccagccataccagctgccagtggaaatcgatcctctcatagccagcaatacaggaatgcacaggaggcaaatcactgaccttttagaccaaagtattcaagtgcattcccagtgctttgtcatcacttcagacaaccgctatattctcgtctgtggcttctgggataaaagtttcagagtctattctacagacacaggaagattgatccaagtggtgtttggccattgggatgtcgtcacttgccttgctcgttctgagtcatatattgggggaaattgctacattctctcagggtcacgtgatgcaactcttttgctgtggtattggaatggaaaatgcagtgggattggagataacccaggcagtgagactgctgctcctcgggccattttgaccggccatgactatgaggtcacatgtgctgcggtgtgtgcggagctaggcctggtgttgagtggttcacaagaaggaccatgtctcatacattccatgaatggagacttgttgaggaccttggagggtcctgaaaactgcctgaaaccaaaactcattcaggcttcaagagagggtcattgtgtcatattctatgaaaacggcctcttctgtacattcagtgtgaatggaaaactccaggccacgatggaaacagatgataacataagagccatccagctgagccgagatgggcagtacctgctcacaggaggagacagaggagtggtcgtggtccggcaggtgtcggacctcaagcagctctttgcctatccaggatgtgacgctggaatccgggccatggcgctgtcttacgaccagaggtgcatcatttctggcatggcttcaggaagcattgtgctattttacaacgactttaaccggtggcatcatgaataccaaacccgctactgatggtgacagctgtacatcaactctgcccctaggatgagcagaagtacctggagcatcattctcttctaccacatctgaatgtaacttaaatttgctcaaagaagcaaaatattttttaaagttattaataattgctatttttgtagtctttgcttgacttttttgggggggattagcaaagcagaaaactggctgctgggttctgtagttttaaaaaatctatatttttagtcataatgagaagtctattttcaccaattatggaaacatacagtggagcaagtaaaccacttattccagctataatattatgaagaacatttcccatgcatctacaagcttgagaaataggattttcacagtggggaagtgggttacaatattggaataggaaaatttgatgctgtaatttgggtcctgtatttttccaaacaactgtgcttcttcagcactaatatttctgggatttaaatagtaatgtttaaattatggtaaatgtaatttaaaacatctcaattaagtctgtctatcaatattgttcttcaagcatgttttagacctagaaaagtatggtttgggggaggctattttattgtgtggttagcacaaggaatctaatttatagcaagtgtgaaatagttaccattttttcctgatctgtcatcttcatagcacaacaaaacgaaatgatggaaatgctcttgagctcacaacatttgtttttcttttaaagtaaatgcaagtaccaaagctcactactgcggtttgcctgtgcctggacaatgaggcggagccactgttgttttgttggggcacccccttccctccccgggtttgcaaatagaggctaccgggtgctgtattcagcaacacctgttttactatttgttattaaactatcatctccaccttccttttgattagcaatttgtactaagaaacgaaacaatgttatttggtggtgtataattctacttttctagtagattactgtgtggaattctgtgaaaaatatttgagaaaaggcctgtattgcataaataaattctttgtatgttgtgaaaaaaaaaaaaaaaaa

SEQ ID NO: 336 - protein, 2863 aa, Homo sapiens
MASEDNRVPSPPPTGDDGGGGGREETPTEGGALSLKPGLPIRGIRMKFAVLTGLVEVGEVSNRDIVETVFNLLVGGQFDLEMNFIIQEGESINCMVDLLEKCDITCQAEVWSMFTAILKKSIRNLQVCTEVGLVEKVLGKIEKVDNMIADLLVDMLGVLASYNLTVRELKLFFSKLQGDKGRWPPHAGKLLSVLKHMPQKYGPDAFFNFPGKSAAAIALPPIAKWPYQNGFTFHTWLRMDPVNNINVDKDKPYLYCFRTSKGLGYSAHFVGGCLIVTSIKSKGKGFQHCVKFDFKPQKWYMVTIVHIYNRWKNSELRCYVNGELASYGEITWFVNTSDTFDKCFLGSSETADANRVFCGQMTAVYLFSEALNAAQIFAIYQLGLGYKGTFKFKAESDLFLAEHHKLLLYDGKLSSAIAFTYNPRATDAQLCLESSPKDNPSIFVHSPHALMLQDVKAVLTHSIQSAMHSIGGVQVLFPLFAQLDYRQYLSDEIDLTICSTLLAFIMELLKNSIAMQEQMLACKGFLVIGYSLEKSSKSHVSRAVLELCLAFSKYLSNLQNGMPLLKQLCDHVLLNPAIWIHTPAKVQLMLYTYLSTEFIGTVNIYNTIRRVGTVLLIMHTLKYYYWAVNPQDRSGITPKGLDGPRPNQKEMLSLRAFLLMFIKQLVMKDSGVKEDELQAILNYLLTMHEDDNLMDVLQLLVALMSEHPNSMIPAFDQRNGLRVIYKLLASKSEGIRVQALKAMGYFLKHLAPKRKAEVMLGHGLFSLLAERLMLQTNLITMTTYNVLFEILIEQIGTQVIHKQHPDPDSSVKIQNPQILKVIATLLRNSPQCPESMEVRRAFLSDMIKLFNNSRENRRSLLQCSVWQEWMLSLCYFNPKNSDEQKITEMVYAIFRILLYHAVKYEWGGWRVWVDTLSITHSKVTFEIHKENLANIFREQQGKVDEEIGLCSSTSVQAASGIRRDINVSVGSQQPDTKDSPVCPHFTTNGNENSSIEKTSSLESASNIELQTTNTSYEEMKAEQENQELPDEGTLEETLTNETRNADDLEVSSDIIEAVAISSNSFITTGKDSMTVSEVTASISSPSEEDASEMPEFLDKSIVEEEEDDDYVELKVEGSPTEEANLPTELQDNSLSPAASEAGEKLDMFGNDDKLIFQEGKPVTEKQTDTETQDSKDSGIQTMTASGSSAMSPETTVSQIAVESDLGQMLEEGKKATNLTRETKLINDCHGSVSEASSEQKIAKLDVSNVATDTERLELKASPNVEAPQPHRHVLEISRQHEQPGQGIAPDAVNGQRRDSRSTVFRIPEFNWSQMHQRLLTDLLFSIETDIQMWRSHSTKTVMDFVNSSDNVIFVHNTIHLISQVMDNMVMACGGILPLLSAATSATHELENIEPTQGLSIEASVTFLQRLISLVDVLIFASSLGFTEIEAEKSMSSGGILRQCLRLVCAVAVRNCLECQQHSQLKTRGDKALKPMHSLIPLGKSAAKSPVDIVTGGISPVRDLDRLLQDMDINRLRAVVFRDIEDSKQAQFLALAVVYFISVLMVSKYRDILEPQNERHSQSCTETGSENENVSLSEITPAAFSTLTTASVEESESTSSARRRDSGIGEETATGLGSHVEVTPHTAPPGVSAGPDAISEVLSTLSLEVNKSPETKNDRGNDLDTKATPSVSVSKNVNVKDILRSLVNIPADGVTVDPALLPPACLGALGDLSVEQPVQFRSFDRSVIVAAKKSAVSPSTFNTSIPTNAVSVVSSVDSAQASDMGGESPGSRSSNAKLPSVPTVDSVSQDPVSNMSITERLEHALEKAAPLLREIFVDFAPFLSRTLLGSHGQELLIEGTSLVCMKSSSSVVELVMLLCSQEWQNSIQKNAGLAFIELVNEGRLLSQTMKDHLVRVANEAEFILSRQRAEDIHRHAEFESLCAQYSADKREDEKMCDHLIRAAKYRDHVTATQLIQKIINILTDKHGAWGNSAVSRPLEFWRLDYWEDDLRRRRRFVRNPLGSTHPEATLKTAVEHVCIFKLRENSKATDEDILAKGKQSIRSQALGNQNSENEILLEGDDDTLSSVDEKDLENLAGPVSLSTPAQLVAPSVVVKGTLSVTSSELYFEVDEEDPNFKKIDPKILAYTEGLHGKWLFTEIRSIFSRRYLLQNTALEIFMANRVAVMFNFPDPATVKKVVNYLPRVGVGTSFGLPQTRRISLASPRQLFKASNMTQRWQHREISNFEYLMFLNTIAGRSYNDLNQYPVFPWVITNYESEELDLTLPTNFRDLSKPIGALNPKRAAFFAERYESWEDDQVPKFHYGTHYSTASFVLAWLLRIEPFTTYFLNLQGGKFDHADRTFSSISRAWRNSQRDTSDIKELIPEFYYLPEMFVNFNNYNLGVMDDGTVVSDVELPPWAKTSEEFVHINRLALESEFVSCQLHQWIDLIFGYKQQGPEAVRALNVFYYLTYEGAVNLNSITDPVLREAVEAQIRSFGQTPSQLLIEPHPPRGSAMQVSPLMFTDKAQQDVIMVLKFPSNSPVTHVAANTQPGLATPAVITVTANRLFAVNKWHNLPAHQGAVQDQPYQLPVEIDPLIASNTGMHRRQITDLLDQSIQVHSQCFVITSDNRYILVCGFWDKSFRVYSTDTGRLIQVVFGHWDVVTCLARSESYIGGNCYILSGSRDATLLLWYWNGKCSGIGDNPGSETAAPRAILTGHDYEVTCAAVCAELGLVLSGSQEGPCLIHSMNGDLLRTLEGPENCLKPKLIQASREGHCVIFYENGLFCTFSVNGKLQATMETDDNIRAIQLSRDGQYLLTGGDRGVVVVRQVSDLKQLFAYPGCDAGIRAMALSYDQRCIISGMASGSIVLFYNDFNRWHHEYQTRY

SEQ ID NO: 337 - DNA, 106 bp, Homo sapiens
ggcccaatgggctaagcctggacatcccggctgggcgcctctactgggtggatgccttctacgaccgcatcgagacgatactgctcaatggcacagaccggaagat

SEQ ID NO: 338 - DNA, 14923 bp, Homo sapiens
acttcagtccggggaacagcggtgcgagctccaggcccatgcactgaggaggcggaaacaaggggagcccccagagctccatcaagccccctccaaaggctcccctacccggtccacgccccccaccccccctccccgcctcctcccaattgtgcatttttgcagccggaggcggctccgagatggggctgtgagcttcgcccggggagggggaaagagcagcgaggagtgaagcgggggggtggggtgaagggtttggatttcggggcagggggcgcacccccgtcagcaggccctccccaaggggctcggaactctacctcttcacccacgcccctggtgcgctttgccgaaggaaagaataagaacagagaaggaggagggggaaaggaggaaaagggggaccccccaactggggggggtgaaggagagaagtagcaggaccagaggggaaggggctgctgcttgcatcagcccacaccatgctgaccccgccgttgctcctgctgctgcccctgctctcagctctggtcgcggcggctatcgacgcccctaagacttgcagccccaagcagtttgcctgcagagatcaaataacctgtatctcaaagggctggcggtgcgacggtgagagggactgcccagacggatctgacgaggcccctgagatttgtccacagagtaaggcccagcgatgccagccaaacgagcataactgcctgggtactgagctgtgtgttcccatgtcccgcctctgcaatggggtccaggactgcatggacggctcagatgaggggccccactgccgagagctccaaggcaactgctctcgcctgggctgccagcaccattgtgtccccacactcgatgggcccacctgctactgcaacagcagctttcagcttcaggcagatggcaagacctgcaaagattttgatgagtgctcagtgtacggcacctgcagccagctatgcaccaacacagacggctccttcatatgtggctgtgttgaaggatacctcctgcagccggataaccgctcctgcaaggccaagaacgagccagtagaccggccccctgtgctgttgatagccaactcccagaacatcttggccacgtacctgagtggggcccaggtgtctaccatcacacctacgagcacgcggcagaccacagccatggacttcagctatgccaacgagaccgtatgctgggtgcatgttggggacagtgctgctcagacgcagctcaagtgtgcccgcatgcctggcctaaagggcttcgtggatgagcacaccatcaacatctccctcagtctgcaccacgtggaacagatggccatcgactggctgacaggcaacttctactttgtggatgacatcgatgataggatctttgtctgcaacagaaatggggacacatgtgtcacattgctagacctggaactctacaaccccaagggcattgccctggaccctgccatggggaaggtgtttttcactgactatgggcagatcccaaaggtggaacgctgtgacatggatgggcagaaccgcaccaagctcgtcgacagcaagattgtgtttcctcatggcatcacgctggacctggtcagccgccttgtctactgggcagatgcctatctggactatattgaagtggtggactatgagggcaagggccgccagaccatcatccagggcatcctgattgagcacctgtacggcctgactgtgtttgagaattatctctatgccaccaactcggacaatgccaatgcccagcagaagacgagtgtgatccgtgtgaaccgctttaacagcaccgagtaccaggttgtcacccgggtggacaagggtggtgccctccacatctaccaccagaggcgtcagccccgagtgaggagccatgcctgtgaaaacgaccagtatgggaagccgggtggctgctctgacatctgcctgctggccaacagccacaaggcgcggacctgccgctgccgttccggcttcagcctgggcagtgacgggaagtcatgcaagaagccggagcatgagctgttcctcgtgtatggcaagggccggccaggcatcatccggggcatggatatgggggccaaggtcccggatgagcacatgatccccattgaaaacctcatgaacccccgagccctggacttccacgctgagaccggcttcatctactttgccgacaccaccagctacctcattggccgccagaagattgatggcactgagcgggagaccatcctgaaggacggcatccacaatgtggagggtgtggccgtggactggatgggagacaatctgtactggacggacgatgggcccaaaaagacaatcagcgtggccaggctggagaaagctgctcagacccgcaagactttaatcgagggcaaaatgacacaccccagggctattgtggtggatccactcaatgggtggatgtactggacagactgggaggaggaccccaaggacagtcggcgtgggcggctggagagggcgtggatggatggctcacaccgagacatctttgtcacctccaagacagtgctttggcccaatgggctaagcctggacatcccggctgggcgcctctactgggtggatgccttctacgaccgcatcgagacgatactgctcaatggcacagaccggaagattgtgtatgaaggtcctgagctgaaccacgcctttggcctgtgtcaccatggcaactacctcttctggactgagtatcggagtggcagtgtctaccgcttggaacggggtgtaggaggcgcaccccccactgtgacccttctgcgcagtgagcggccccccatctttgagatccgaatgtatgatgcccagcagcagcaagttggcaccaacaaatgccgggtgaacaatggcggctgcagcagcctgtgcttggccacccctgggagccgccagtgcgcctgtgctgaggaccaggtgttggacgcagacggcgtcacttgcttggcgaacccatcctacgtgcctccaccccagtgccagccaggcgagtttgcctgtgccaacagccgctgcatccaggagcgctggaagtgtgacggagacaacgattgcctggacaacagtgatgaggccccagccctctgccatcagcacacctgcccctcggaccgattcaagtgcgagaacaaccggtgcatccccaaccgctggctctgcgacggggacaatgactgtgggaacagtgaagatgagtccaatgccacttgttcagcccgcacctgcccccccaaccagttctcctgtgccagtggccgctgcatccccatctcctggacgtgtgatctggatgacgactgtggggaccgctctgatgagtctgcttcgtgtgcctatcccacctgcttccccctgactcagtttacctgcaacaatggcagatgtatcaacatcaactggagatgcgacaatgacaatgactgtggggacaacagtgacgaagccggctgcagccactcctgttctagcacccagttcaagtgcaacagcgggcgttgcatccccgagcactggacctgcgatggggacaatgactgcggagactacagtgatgagacacacgccaactgcaccaaccaggccacgaggccccctggtggctgccacactgatgagttccagtgccggctggatggactatgcatccccctgcggtggcgctgcgatggggacactgactgcatggactccagcgatgagaagagctgtgagggagtgacccacgtctgcgatcccagtgtcaagtttggctgcaaggactcagctcggtgcatcagcaaagcgtgggtgtgtgatggcgacaatgactgtgaggataactcggacgaggagaactgcgagtccctggcctgcaggccaccctcgcacccttgtgccaacaacacctcagtctgcctgccccctgacaagctgtgtgatggcaacgacgactgtggcgacggctcagatgagggcgagctctgcgaccagtgctctctgaataacggtggctgcagccacaactgctcagtggcacctggcgaaggcattgtgtgttcctgccctctgggcatggagctggggcccgacaaccacacctgccagatccagagctactgtgccaagcatctcaaatgcagccaaaagtgcgaccagaacaagttcagcgtgaagtgctcctgctacgagggctgggtcctggaacctgacggcgagagctgccgcagcctggaccccttcaagccgttcatcattttctccaaccgccatgaaatccggcgcatcgatcttcacaaaggagactacagcgtcctggtgcccggcctgcgcaacaccatcgccctggacttccacctcagccagagcgccctctactggaccgacgtggtggaggacaagatctaccgcgggaagctgctggacaacggagccctgactagtttcgaggtggtgattcagtatggcctggccacacccgagggcctggctgtagactggattgcaggcaacatctactgggtggagagtaacctggatcagatcgaggtggccaagctggatgggaccctccggaccaccctgctggccggtgacattgagcacccaagggcaatcgcactggatccccgggatgggatcctgttttggacagactgggatgccagcctgccccgcattgaggcagcctccatgagtggggctgggcgccgcaccgtgcaccgggagaccggctctgggggctggcccaacgggctcaccgtggactacctggagaagcgcatcctttggattgacgccaggtcagatgccatttactcagcccgttacgacggctctggccacatggaggtgcttcggggacacgagttcctgtcgcacccgtttgcagtgacgctgtacgggggggaggtctactggactgactggcgaacaaacacactggctaaggccaacaagtggaccggccacaatgtcaccgtggtacagaggaccaacacccagccctttgacctgcaggtgtaccacccctcccgccagcccatggctcccaatccctgtgaggccaatgggggccagggcccctgctcccacctgtgtctcatcaactacaaccggaccgtgtcctgcgcctgcccccacctcatgaagctccacaaggacaacaccacctgctatgagtttaagaagttcctgctgtacgcacgtcagatggagatccgaggtgtggacctggatgctccctactacaactacatcatctccttcacggtgcccgacatcgacaacgtcacagtgctagactacgatgcccgcgagcagcgtgtgtactggtctgacgtgcggacacaggccatcaagcgggccttcatcaacggcacaggcgtggagacagtcgtctctgcagacttgccaaatgcccacgggctggctgtggactgggtctcccgaaacctgttctggacaagctatgacaccaataagaagcagatcaatgtggcccggctggatggctccttcaagaacgcagtggtgcagggcctggagcagccccatggccttgtcgtccaccctctgcgtgggaagctctactggaccgatggtgacaacatcagcatggccaacatggatggcagcaatcgcaccctgctcttcagtggccagaagggccccgtgggcctggctattgacttccctgaaagcaaactctactggatcagctccgggaaccataccatcaaccgctgcaacctggatgggagtgggctggaggtcatcgatgccatgcggagccagctgggcaaggccaccgccctggccatcatgggggacaagctgtggtgggctgatcaggtgtcggaaaagatgggcacatgcagcaaggctgacggctcgggctccgtggtccttcggaacagcaccaccctggtgatgcacatgaaggtctatgacgagagcatccagctggaccataagggcaccaacccctgcagtgtcaacaacggtgactgctcccagctctgcctgcccacgtcagagacgacccgctcctgcatgtgcacagccggctatagcctccggagtggccagcaggcctgcgagggcgtaggttcctttctcctgtactctgtgcatgagggaatcaggggaattcccctggatcccaatgacaagtcagatgccctggtcccagtgtccgggacctcgctggctgtcggcatcgacttccacgctgaaaatgacaccatctactgggtggacatgggcctgagcacgatcagccgggccaagcgggaccagacgtggcgtgaagacgtggtgaccaatggcattggccgtgtggagggcattgcagtggactggatcgcaggcaacatctactggacagaccagggctttgatgtcatcgaggtcgcccggctcaatggctccttccgctacgtggtgatctcccagggtctagacaagccccgggccatcaccgtccacccggagaaagggtacttgttctggactgagtggggtcagtatccgcgtattgagcggtctcggctagatggcacggagcgtgtggtgctggtcaacgtcagcatcagctggcccaacggcatctcagtggactaccaggatgggaagctgtactggtgcgatgcacggacagacaagattgaacggatcgacctggagacaggtgagaaccgcgaggtggttctgtccagcaacaacatggacatgttttcagtgtctgtgtttgaggatttcatctactggagtgacaggactcatgccaacggctctatcaagcgcgggagcaaagacaatgccacagactccgtgcccctgcgaaccggcatcggcgtccagcttaaagacatcaaagtcttcaaccgggaccggcagaaaggcaccaacgtgtgcgcggtggccaatggcgggtgccagcagctgtgcctgtaccggggccgtgggcagcgggcctgcgcctgtgcccacgggatgctggctgaagacggagcatcgtgccgcgagtatgccggctacctgctctactcagagcgcaccattctcaagagtatccacctgtcggatgagcgcaacctcaatgcgcccgtgcagcccttcgaggaccctgagcacatgaagaacgtcatcgccctggcctttgactaccgggcaggcacctctccgggcacccccaatcgcatcttcttcagcgacatccactttgggaacatccaacagatcaacgacgatggctccaggaggatcaccattgtggaaaacgtgggctccgtggaaggcctggcctatcaccgtggctgggacactctctattggacaagctacacgacatccaccatcacgcgccacacagtggaccagacccgcccaggggccttcgagcgtgagaccgtcatcactatgtctggagatgaccacccacgggccttcgttttggacgagtgccagaacctcatgttctggaccaactggaatgagcagcatcccagcatcatgcgggcggcgctctcgggagccaatgtcctgacccttatcgagaaggacatccgtacccccaatggcctggccatcgaccaccgtgccgagaagctctacttctctgacgccaccctggacaagatcgagcggtgcgagtatgacggctcccaccgctatgtgatcctaaagtcagagcctgtccaccccttcgggctggccgtgtatggggagcacattttctggactgactgggtgcggcgggcagtgcagcgggccaacaagcacgtgggcagcaacatgaagctgctgcgcgtggacatcccccagcagcccatgggcatcatcgccgtggccaacgacaccaacagctgtgaactctctccatgccgaatcaacaacggtggctgccaggacctgtgtctgctcactcaccagggccatgtcaactgctcatgccgagggggccgaatcctccaggatgacctcacctgccgagcggtgaattcctcttgccgagcacaagatgagtttgagtgtgccaatggcgagtgcatcaacttcagcctgacctgcgacggcgtcccccactgcaaggacaagtccgatgagaagccatcctactgcaactcccgccgctgcaagaagactttccggcagtgcagcaatgggcgctgtgtgtccaacatgctgtggtgcaacggggccgacgactgtggggatggctctgacgagatcccttgcaacaagacagcctgtggtgtgggcgagttccgctgccgggacgggacctgcatcgggaactccagccgctgcaaccagtttgtggattgtgaggacgcctcagatgagatgaactgcagtgccaccgactgcagcagctacttccgcctgggcgtgaagggcgtgctcttccagccctgcgagcggacctcactctgctacgcacccagctgggtgtgtgatggcgccaatgactgtggggactacagtgatgagcgcgactgcccaggtgtgaaacgccccagatgccctctgaattacttcgcctgccctagtgggcgctgcatccccatgagctggacgtgtgacaaagaggatgactgtgaacatggcgaggacgagacccactgcaacaagttctgctcagaggcccagtttgagtgccagaaccatcgctgcatctccaagcagtggctgtgtgacggcagcgatgactgtggggatggctcagacgaggctgctcactgtgaaggcaagacgtgcggcccctcctccttctcctgccctggcacccacgtgtgcgtccccgagcgctggctctgtgacggtgacaaagactgtgctgatggtgcagacgagagcatcgcagctggttgcttgtacaacagcacttgtgacgaccgtgagttcatgtgccagaaccgccagtgcatccccaagcacttcgtgtgtgaccacgaccgtgactgtgcagatggctctgatgagtcccccgagtgtgagtacccgacctgcggccccagtgagttccgctgtgccaatgggcgctgtctgagctcccgccagtgggagtgtgatggcgagaatgactgccacgaccagagtgacgaggctcccaagaacccacactgcaccagccaagagcacaagtgcaatgcctcgtcacagttcctgtgcagcagtgggcgctgtgtggctgaggcactgctctgcaacggccaggatgactgtggcgacagctcggacgagcgtggctgccacatcaatgagtgtctcagccgcaagctcagtggctgcagccaggactgtgaggacctcaagatcggcttcaagtgccgctgtcgccctggcttccggctgaaggacgacggccggacgtgtgctgatgtggacgagtgcagcaccaccttcccctgcagccagcgctgcatcaacactcatggcagctataagtgtctgtgtgtggagggctatgcaccccgcggcggcgacccccacagctgcaaggctgtgactgacgaggaaccgtttctgatcttcgccaaccggtactacctgcgcaagctcaacctggacgggtccaactacacgttacttaagcagggcctgaacaacgccgttgccttggattttgactaccgagagcagatgatctactggacagatgtgaccacccagggcagcatgatccgaaggatgcaccttaacgggagcaatgtgcaggtcctacaccgtacaggcctcagcaaccccgatgggctggctgtggactgggtgggtggcaacctgtactggtgcgacaaaggccgggacaccatcgaggtgtccaagctcaatggggcctatcggacggtgctggtcagctctggcctccgtgagcccagggctctggtggtggatgtgcagaatgggtacctgtactggacagactggggtgaccattcactgatcggccgcatcggcatggatgggtccagccgcagcgtcatcgtggacaccaagatcacatggcccaatggcctgacgctggactatgtcactgagcgcatctactgggccgacgcccgcgaggactacattgaatttgccagcctggatggctccaatcgccacgttgtgctgagccaggacatcccgcacatctttgcactgaccctgtttgaggactacgtctactggaccgactgggaaacaaagtccattaaccgagcccacaagaccacgggcaccaacaaaacgctcctcatcagcacgctgcaccggcccatggacctgcatgtcttccatgccctgcgccagccagacgtgcccaatcacccctgcaaggtcaacaatggtggctgcagcaacctgtgcctgctgtcccccgggggagggcacaaatgtgcctgccccaccaacttctacctgggcagcgatgggcgcacctgtgtgtccaactgcacggctagccagtttgtatgcaagaacgacaagtgcatccccttctggtggaagtgtgacaccgaggacgactgcggggaccactcagacgagcccccggactgccctgagttcaagtgccggcccggacagttccagtgctccacaggtatctgcacaaaccctgccttcatctgcgatggcgacaatgactgccaggacaacagtgacgaggccaactgtgacatccacgtctgcttgcccagtcagttcaaatgcaccaacaccaaccgctgtattcccggcatcttccgctgcaatgggcaggacaactgcggagatggggaggatgagagggactgccccgaggtgacctgcgcccccaaccagttccagtgctccattaccaaacggtgcatcccccgggtctgggtctgcgaccgggacaatgactgtgtggatggcagtgatgagcccgccaactgcacccagatgacctgtggtgtggacgagttccgctgcaaggattcgggccgctgcatcccagcgcgttggaagtgtgacggagaggatgactgtggggatggctcggatgagcccaaggaagagtgtgatgaacgcacctgtgagccataccagttccgctgcaagaacaaccgctgcgtgcccggccgctggcagtgcgactacgacaacgattgcggtgacaactccgatgaagagagctgcacccctcggccctgctccgagagtgagttctcctgtgccaacggccgctgcatcgcggggcgctggaaatgcgatggagaccacgactgcgcggacggctcggacgagaaagactgcaccccccgctgtgacatggaccagttccagtgcaagagcggccactgcatccccctgcgctggcgctgtgacgcagacgccgactgcatggacggcagcgacgaggaggcctgcggcactggcgtgcggacctgccccctggacgagttccagtgcaacaacaccttgtgcaagccgctggcctggaagtgcgatggcgaggatgactgtggggacaactcagatgagaaccccgaggagtgtgcccggttcgtgtgccctcccaaccggcccttccgttgcaagaatgaccgcgtctgtctgtggatcgggcgccaatgcgatggcacggacaactgtggggatgggactgatgaagaggactgtgagccccccacagcccacaccacccactgcaaagacaagaaggagtttctgtgccggaaccagcgctgcctctcctcctccctgcgctgcaacatgttcgatgactgcggggacggctctgacgaggaggactgcagcatcgaccccaagctgaccagctgcgccaccaatgccagcatctgtggggacgaggcacgctgcgtgcgcaccgagaaagcggcctactgtgcctgccgctcgggcttccacaccgtgcccggccagcccggatgccaagacatcaacgagtgcctgcgcttcggcacctgctcccagctctgcaacaacaccaagggcggccacctctgcagctgcgctcggaacttcatgaagacgcacaacacctgcaaggccgaaggctctgagtaccaggtcctgtacatcgctgatgacaatgagatccgcagcctgttccccggccacccccattcggcttacgagcaggcattccagggtgacgagagtgtccgcattgatgctatggatgtccatgtcaaggctggccgtgtctattggaccaactggcacacgggcaccatctcctaccgcagcctgccacctgctgcgcctcctaccacttccaaccgccaccggcgacagattgaccggggtgtcacccacctcaacatttcagggctgaagatgcccagaggcatcgccatcgactgggtggccggaaacgtgtactggaccgactcgggccgagatgtgattgaggtggcgcagatgaagggcgagaaccgcaagacgctcatctcgggcatgattgacgagccccacgccattgtggtggacccactgagggggaccatgtactggtcagactggggcaaccaccccaagattgagacggcagcgatggatgggacgcttcgggagacactggtgcaggacaacattcagtggcccacaggcctggccgtggattatcacaatgagcggctgtactgggcagacgccaagctttcagtcatcggcagcatccggctcaatggcacggaccccattgtggctgctgacagcaaacgaggcctaagtcaccccttcagcatcgacgtctttgaggattacatctatggtgtcacctacatcaataatcgtgtcttcaagatccataagtttggccacagccccttggtcaacctgacagggggcctgagccacgcctctgacgtggtcctttaccatcagcacaagcagcccgaagtgaccaacccatgtgaccgcaagaaatgcgagtggctctgcctgctgagccccagtgggcctgtctgcacctgtcccaatgggaagcggctggacaacggcacatgcgtgcctgtgccctctccaacgccccccccagatgctccccggcctggaacctgtaacctgcagtgcttcaacggtggcagctgtttcctcaatgcacggaggcagcccaagtgccgctgccaaccccgctacacgggtgacaagtgtgaactggaccagtgctgggagcactgtcgcaatgggggcacctgtgctgcctccccctctggcatgcccacgtgccggtgccccacgggcttcacgggccccaaatgcacccagcaggtgtgtgcgggctactgtgccaacaacagcacctgcactgtcaaccagggcaaccagccccagtgccgatgcctacccggcttcctgggcgaccgctgccagtaccggcagtgctctggctactgtgagaactttggcacatgccagatggctgctgatggctcccgacaatgccgctgcactgcctactttgagggatcgaggtgtgaggtgaacaagtgcagccgctgtctcgaaggggcctgtgtggtcaacaagcagagtggggatgtcacctgcaactgcacggatggccgggtggcccccagctgtctgacctgcgtcggccactgcagcaatggcggctcctgtaccatgaacagcaaaatgatgcctgagtgccagtgcccaccccacatgacagggccccggtgtgaggagcacgtcttcagccagcagcagccaggacatatagcctccatcctaatccctctgctgttgctgctgctgctggttctggtggccggagtggtattctggtataagcggcgagtccaaggggctaagggcttccagcaccaacggatgaccaacggggccatgaacgtggagattggaaaccccacctacaagatgtacgaaggcggagagcctgatgatgtgggaggcctactggacgctgactttgccctggaccctgacaagcccaccaacttcaccaaccccgtgtatgccacactctacatggggggccatggcagtcgccactccctggccagcacggacgagaagcgagaactcctgggccggggccctgaggacgagataggggaccccttggcatagggccctgccccgtcggactgcccccagaaagcctcctgccccctgccagtgaagtccttcagtgagcccctccccagccagcccttccctggccccgccggatgtataaatgtaaaaatgaaggaattacattttatatgtgagcgagcaagccggcaagcgagcacagtattatttctccatcccctccctgcctgctccttggcacccccatgctgccttcagggagacaggcagggagggcttggggctgcacctcctaccctcccaccagaacgcaccccactgggagagctggtggtgcagccttcccctccctgtataagacactttgccaaggctctcccctctcgccccatccctgcttgcccgctcccacagcttcctgagggctaattctgggaagggagagttctttgctgcccctgtctggaagacgtggctctgggtgaggtaggcgggaaaggatggagtgttttagttcttgggggaggccaccccaaaccccagccccaactccaggggcacctatgagatggccatgctcaacccccctcccagacaggccctccctgtctccagggcccccaccgaggttcccagggctggagacttcctctggtaaacattcctccagcctcccctcccctggggacgccaaggaggtgggccacacccaggaagggaaagcgggcagccccgttttggggacgtgaacgttttaataatttttgctgaattcctttacaactaaataacacagatattgttataaataaaattgtaaaaaaaaaaaaaaaaaaaaa

SEQ ID NO: 339 - protein, 4544 aa, Homo sapiens
MLTPPLLLLLPLLSALVAAAIDAPKTCSPKQFACRDQITCISKGWRCDGERDCPDGSDEAPEICPQSKAQRCQPNEHNCLGTELCVPMSRLCNGVQDCMDGSDEGPHCRELQGNCSRLGCQHHCVPTLDGPTCYCNSSFQLQADGKTCKDFDECSVYGTCSQLCTNTDGSFICGCVEGYLLQPDNRSCKAKNEPVDRPPVLLIANSQNILATYLSGAQVSTITPTSTRQTTAMDFSYANETVCWVHVGDSAAQTQLKCARMPGLKGFVDEHTINISLSLHHVEQMAIDWLTGNFYFVDDIDDRIFVCNRNGDTCVTLLDLELYNPKGIALDPAMGKVFFTDYGQIPKVERCDMDGQNRTKLVDSKIVFPHGITLDLVSRLVYWADAYLDYIEVVDYEGKGRQTIIQGILIEHLYGLTVFENYLYATNSDNANAQQKTSVIRVNRFNSTEYQVVTRVDKGGALHIYHQRRQPRVRSHACENDQYGKPGGCSDICLLANSHKARTCRCRSGFSLGSDGKSCKKPEHELFLVYGKGRPGIIRGMDMGAKVPDEHMIPIENLMNPRALDFHAETGFIYFADTTSYLIGRQKIDGTERETILKDGIHNVEGVAVDWMGDNLYWTDDGPKKTISVARLEKAAQTRKTLIEGKMTHPRAIVVDPLNGWMYWTDWEEDPKDSRRGRLERAWMDGSHRDIFVTSKTVLWPNGLSLDIPAGRLYWVDAFYDRIETILLNGTDRKIVYEGPELNHAFGLCHHGNYLFWTEYRSGSVYRLERGVGGAPPTVTLLRSERPPIFEIRMYDAQQQQVGTNKCRVNNGGCSSLCLATPGSRQCACAEDQVLDADGVTCLANPSYVPPPQCQPGEFACANSRCIQERWKCDGDNDCLDNSDEAPALCHQHTCPSDRFKCENNRCIPNRWLCDGDNDCGNSEDESNATCSARTCPPNQFSCASGRCIPISWTCDLDDDCGDRSDESASCAYPTCFPLTQFTCNNGRCININWRCDNDNDCGDNSDEAGCSHSCSSTQFKCNSGRCIPEHWTCDGDNDCGDYSDETHANCTNQATRPPGGCHTDEFQCRLDGLCIPLRWRCDGDTDCMDSSDEKSCEGVTHVCDPSVKFGCKDSARCISKAWVCDGDNDCEDNSDEENCESLACRPPSHPCANNTSVCLPPDKLCDGNDDCGDGSDEGELCDQCSLNNGGCSHNCSVAPGEGIVCSCPLGMELGPDNHTCQIQSYCAKHLKCSQKCDQNKFSVKCSCYEGWVLEPDGESCRSLDPFKPFIIFSNRHEIRRIDLHKGDYSVLVPGLRNTIALDFHLSQSALYWTDVVEDKIYRGKLLDNGALTSFEVVIQYGLATPEGLAVDWIAGNIYWVESNLDQIEVAKLDGTLRTTLLAGDIEHPRAIALDPRDGILFWTDWDASLPRIEAASMSGAGRRTVHRETGSGGWPNGLTVDYLEKRILWIDARSDAIYSARYDGSGHMEVLRGHEFLSHPFAVTLYGGEVYWTDWRTNTLAKANKWTGHNVTVVQRTNTQPFDLQVYHPSRQPMAPNPCEANGGQGPCSHLCLINYNRTVSCACPHLMKLHKDNTTCYEFKKFLLYARQMEIRGVDLDAPYYNYIISFTVPDIDNVTVLDYDAREQRVYWSDVRTQAIKRAFINGTGVETVVSADLPNAHGLAVDWVSRNLFWTSYDTNKKQINVARLDGSFKNAVVQGLEQPHGLVVHPLRGKLYWTDGDNISMANMDGSNRTLLFSGQKGPVGLAIDFPESKLYWISSGNHTINRCNLDGSGLEVIDAMRSQLGKATALAIMGDKLWWADQVSEKMGTCSKADGSGSVVLRNSTTLVMHMKVYDESIQLDHKGTNPCSVNNGDCSQLCLPTSETTRSCMCTAGYSLRSGQQACEGVGSFLLYSVHEGIRGIPLDPNDKSDALVPVSGTSLAVGIDFHAENDTIYWVDMGLSTISRAKRDQTWREDVVTNGIGRVEGIAVDWIAGNIYWTDQGFDVIEVARLNGSFRYVVISQGLDKPRAITVHPEKGYLFWTEWGQYPRIERSRLDGTERVVLVNVSISWPNGISVDYQDGKLYWCDARTDKIERIDLETGENREVVLSSNNMDMFSVSVFEDFIYWSDRTHANGSIKRGSKDNATDSVPLRTGIGVQLKDIKVFNRDRQKGTNVCAVANGGCQQLCLYRGRGQRACACAHGMLAEDGASCREYAGYLLYSERTILKSIHLSDERNLNAPVQPFEDPEHMKNVIALAFDYRAGTSPGTPNRIFFSDIHFGNIQQINDDGSRRITIVENVGSVEGLAYHRGWDTLYWTSYTTSTITRHTVDQTRPGAFERETVITMSGDDHPRAFVLDECQNLMFWTNWNEQHPSIMRAALSGANVLTLIEKDIRTPNGLAIDHRAEKLYFSDATLDKIERCEYDGSHRYVILKSEPVHPFGLAVYGEHIFWTDWVRRAVQRANKHVGSNMKLLRVDIPQQPMGIIAVANDTNSCELSPCRINNGGCQDLCLLTHQGHVNCSCRGGRILQDDLTCRAVNSSCRAQDEFECANGECINFSLTCDGVPHCKDKSDEKPSYCNSRRCKKTFRQCSNGRCVSNMLWCNGADDCGDGSDEIPCNKTACGVGEFRCRDGTCIGNSSRCNQFVDCEDASDEMNCSATDCSSYFRLGVKGVLFQPCERTSLCYAPSWVCDGANDCGDYSDERDCPGVKRPRCPLNYFACPSGRCIPMSWTCDKEDDCEHGEDETHCNKFCSEAQFECQNHRCISKQWLCDGSDDCGDGSDEAAHCEGKTCGPSSFSCPGTHVCVPERWLCDGDKDCADGADESIAAGCLYNSTCDDREFMCQNRQCIPKHFVCDHDRDCADGSDESPECEYPTCGPSEFRCANGRCLSSRQWECDGENDCHDQSDEAPKNPHCTSQEHKCNASSQFLCSSGRCVAEALLCNGQDDCGDSSDERGCHINECLSRKLSGCSQDCEDLKIGFKCRCRPGFRLKDDGRTCADVDECSTTFPCSQRCINTHGSYKCLCVEGYAPRGGDPHSCKAVTDEEPFLIFANRYYLRKLNLDGSNYTLLKQGLNNAVALDFDYREQMIYWTDVTTQGSMIRRMHLNGSNVQVLHRTGLSNPDGLAVDWVGGNLYWCDKGRDTIEVSKLNGAYRTVLVSSGLREPRALVVDVQNGYLYWTDWGDHSLIGRIGMDGSSRSVIVDTKITWPNGLTLDYVTERIYWADAREDYIEFASLDGSNRHVVLSQDIPHIFALTLFEDYVYWTDWETKSINRAHKTTGTNKTLLISTLHRPMDLHVFHALRQPDVPNHPCKVNNGGCSNLCLLSPGGGHKCACPTNFYLGSDGRTCVSNCTASQFVCKNDKCIPFWWKCDTEDDCGDHSDEPPDCPEFKCRPGQFQCSTGICTNPAFICDGDNDCQDNSDEANCDIHVCLPSQFKCTNTNRCIPGIFRCNGQDNCGDGEDERDCPEVTCAPNQFQCSITKRCIPRVWVCDRDNDCVDGSDEPANCTQMTCGVDEFRCKDSGRCIPARWKCDGEDDCGDGSDEPKEECDERTCEPYQFRCKNNRCVPGRWQCDYDNDCGDNSDEESCTPRPCSESEFSCANGRCIAGRWKCDGDHDCADGSDEKDCTPRCDMDQFQCKSGHCIPLRWRCDADADCMDGSDEEACGTGVRTCPLDEFQCNNTLCKPLAWKCDGEDDCGDNSDENPEECARFVCPPNRPFRCKNDRVCLWIGRQCDGTDNCGDGTDEEDCEPPTAHTTHCKDKKEFLCRNQRCLSSSLRCNMFDDCGDGSDEEDCSIDPKLTSCATNASICGDEARCVRTEKAAYCACRSGFHTVPGQPGCQDINECLRFGTCSQLCNNTKGGHLCSCARNFMKTHNTCKAEGSEYQVLYIADDNEIRSLFPGHPHSAYEQAFQGDESVRIDAMDVHVKAGRVYWTNWHTGTISYRSLPPAAPPTTSNRHRRQIDRGVTHLNISGLKMPRGIAIDWVAGNVYWTDSGRDVIEVAQMKGENRKTLISGMIDEPHAIVVDPLRGTMYWSDWGNHPKIETAAMDGTLRETLVQDNIQWPTGLAVDYHNERLYWADAKLSVIGSIRLNGTDPIVAADSKRGLSHPFSIDVFEDYIYGVTYINNRVFKIHKFGHSPLVNLTGGLSHASDVVLYHQHKQPEVTNPCDRKKCEWLCLLSPSGPVCTCPNGKRLDNGTCVPVPSPTPPPDAPRPGTCNLQCFNGGSCFLNARRQPKCRCQPRYTGDKCELDQCWEHCRNGGTCAASPSGMPTCRCPTGFTGPKCTQQVCAGYCANNSTCTVNQGNQPQCRCLPGFLGDRCQYRQCSGYCENFGTCQMAADGSRQCRCTAYFEGSRCEVNKCSRCLEGACVVNKQSGDVTCNCTDGRVAPSCLTCVGHCSNGGSCTMNSKMMPECQCPPHMTGPRCEEHVFSQQQPGHIASILIPLLLLLLLVLVAGVVFWYKRRVQGAKGFQHQRMTNGAMNVEIGNPTYKMYEGGEPDDVGGLLDADFALDPDKPTNFTNPVYATLYMGGHGSRHSLASTDEKRELLGRGPEDEIGDPLA

SEQ ID NO: 340 - DNA, 106 bp, Homo sapiens
gtgatgtgacagcccaggccttcctggacgagacggccgtcatgacgaagatgcaacacgagaacctggtgcgtctcctgggcgtgatcctgcaccaggggctgta

SEQ ID NO: 341 - DNA, 2098 bp, Homo sapiens
agtgcggccggcgctaggacccgcgggggcctcccaggccgcggcgcctcccgctttcccccactccccgacccttcttcgcccccaaaatgaggaaacggagcaactcgctccaagttgtgcagccgggaccgcctcggggtgtgcagccggctcgcggaggccctcctgggggcgggcgcggggcgcggctcgggggcgccccctgagcagaaaacaggaagaaccaggctcggtccagtggcacccagctccctacctcctgtgccagccgactggcctgtggcaggccattcccagcgtccccgactgtgaccacttgctcagtgtgcctctcacctgcctcagtttccctctgggggcgatggcggggcgaggctctctggtttcctggcgggcatttcacggctgtgattctgctgaggaacttccccgggtgagcccccgcttcctccgagcctggcacccccctcccgtctcagccaggatgccaacgaggcgctgggccccgggcacccagtgtatcaccaaatgcgagcacacccgccccaagccaggggagctggccttccgcaagggcgacgtggtcaccatcctggaggcctgcgagaacaagagctggtaccgcgtcaagcaccacaccagtggacaggaggggctgctggcagctggggcgctgcgggagcgggaggccctctccgcagaccccaagctcagcctcatgccgtggttccacgggaagatctcgggccaggaggctgtccagcagctgcagcctcccgaggatgggctgttcctggtgcgggagtccgcgcgccaccccggcgactacgtcctgtgcgtgagctttggccgcgacgtcatccactaccgcgtgctgcaccgcgacggccacctcacaatcgatgaggccgtgttcttctgcaacctcatggacatggtggagcattacagcaaggacaagggcgctatctgcaccaagctggtgagaccaaagcggaaacacgggaccaagtcggccgaggaggagctggccagggcgggctggttactgaacctgcagcatttgacattgggagcacagatcggagagggagagtttggagctgtcctgcagggtgagtacctggggcaaaaggtggccgtgaagaatatcaagtgtgatgtgacagcccaggccttcctggacgagacggccgtcatgacgaagatgcaacacgagaacctggtgcgtctcctgggcgtgatcctgcaccaggggctgtacattgtcatggagcacgtgagcaagggcaacctggtgaactttctgcggacccggggtcgagccctcgtgaacaccgctcagctcctgcagttttctctgcacgtggccgagggcatggagtacctggagagcaagaagcttgtgcaccgcgacctggccgcccgcaacatcctggtctcagaggacctggtggccaaggtcagcgactttggcctggccaaagccgagcggaaggggctagactcaagccggctgcccgtcaagtggacggcgcccgaggctctcaaacacgggaagttcaccagcaagtcggatgtctggagttttggggtgctgctctgggaggtcttctcatatggacgggctccgtaccctaaaatgtcactgaaagaggtgtcggaggccgtggagaaggggtaccgcatggaaccccccgagggctgtccaggccccgtgcacgtcctcatgagcagctgctgggaggcagagcccgcccgccggccacccttccgcaaactggccgagaagctggcccgggagctacgcagtgcaggtgccccagcctccgtctcagggcaggacgccgacggctccacctcgccccgaagccaggagccctgaccccacccggtggggcccttggccccagaggaccgagagagtggagagtgcggcgtgggggcactgaccaggcccaaggagggtccaggcgggcaagtcatcctcctggtgcccacagcaggggctggcccacgtagggggctctgggcggcccgtggacaccccagacctgcgaaggatgatcgcccgataaagacggattctaaggac

SEQ ID NO: 342 - protein, 507 aa, Homo sapiens
MAGRGSLVSWRAFHGCDSAEELPRVSPRFLRAWHPPPVSARMPTRRWAPGTQCITKCEHTRPKPGELAFRKGDVVTILEACENKSWYRVKHHTSGQEGLLAAGALREREALSADPKLSLMPWFHGKISGQEAVQQLQPPEDGLFLVRESARHPGDYVLCVSFGRDVIHYRVLHRDGHLTIDEAVFFCNLMDMVEHYSKDKGAICTKLVRPKRKHGTKSAEEELARAGWLLNLQHLTLGAQIGEGEFGAVLQGEYLGQKVAVKNIKCDVTAQAFLDETAVMTKMQHENLVRLLGVILHQGLYIVMEHVSKGNLVNFLRTRGRALVNTAQLLQFSLHVAEGMEYLESKKLVHRDLAARNILVSEDLVAKVSDFGLAKAERKGLDSSRLPVKWTAPEALKHGKFTSKSDVWSFGVLLWEVFSYGRAPYPKMSLKEVSEAVEKGYRMEPPEGCPGPVHVLMSSCWEAEPARRPPFRKLAEKLARELRSAGAPASVSGQDADGSTSPRSQEP

SEQ ID NO: 343 - DNA, 110 bp, Homo sapiens
agccacagaatatatccagtatatgcgaaggaaaaaccacacacaccagcaagatattgacgacctcaagcggcagaatgctcttctggagcagcaagtccgtgcactgg

SEQ ID NO: 344 - DNA, 2010 bp, Homo sapiens
agtgaggaggtggttcttgcccgtgttgtgtgtgtgtgtgagtgagagagcgagtgagtgagtgagtgagtgtgtgtgtgggggggactcggcttgttgttgtcggtgacttccccctccccttcaccccttcccctccccgccgccgctgcagtggccgctccctgggccgtaggaaatgagcgataacgatgacatcgaggtggagagcgacgaagagcaaccgaggtttcaatctgcggctgacaaacgggctcatcataatgcactggaacgaaaacgtagggaccacatcaaagacagctttcacagtttgcgggactcagtcccatcactccaaggagagaaggcatcccgggcccaaatcctagacaaagccacagaatatatccagtatatgcgaaggaaaaaccacacacaccagcaagatattgacgacctcaagcggcagaatgctcttctggagcagcaagtccgtgcactggagaaggcgaggtcaagtgcccaactgcagaccaactacccctcctcagacaacagcctctacaccaacgccaagggcagcaccatctctgccttcgatgggggctcggactccagctcggagtctgagcctgaagagccccaaagcaggaagaagctccggatggaggccagctaagccactcggggcaggccagcaataaaaactgtctgtctccatcgtctcatcctcctttcagttcgttggtagagccctcagaaccatttaagagactctttatttttctctttctcccttttttttttaaatttttatttttacgtagaagctcttggacaacagctctcgttctccttccccatttccactgtatattttttaatgtattcccttcagggattccctgtccccaacaggaatttttaaaccaaaacaccccaacttggcagctttttctgtggaggacagacggccggccggacctctgagcacatagtgtcctgcccaccctaccagctcctccagccctgccgggcacatgcccgggggacgcctgccctgcccaggtggcctcctggcccgccctcacctctgatagactttgtgaatctgaactgctctactttgagaagatgaccggtttggagtaatcagaatgaaccctcctcctttttaagggttttttttttttcctttttctaaaaagctatgtatcgctcctattgaaagaccagatccttagagaagtttgtggtataaaaaggaagtggggacagattcgcagcacagagtcgctggcatgtttcactcctgcttctctcagccagctgtttaagcctgcggcgccagcctcacggagggccgtgtgacactctcgtggtatgtatgggagatggcagcagtgaagcagcagccaccagggagtggccatttggggttgggacagggagggtgttttgggtggcatagaggttttgtattgagggccagtgatgatgttttgatatttatttcctgctacttaaatttgaatctgagtgaattgtacctatttctgatgatgtcggtcttgcaaagcgacagattcataaagtaatgatgaaatctttctttcttcccgtgtgtatttctaagaaatagagccaactgattttgtatgtaaataccaagagcaatttacctggtactaaacccgcaccccagtgcggacccttcccagccctcatcccacttcctttcctactgtcctggaacctgtctccattgtgtgatccagccctggttctggctgtggtcagcagatgccagtgaagggttttgtgtgtttaggcctcatttctttgtctttttcctactccgttcctggcatttgctgatttctagtgtatactctgtagtctcagttcgtgtttgattccattccatggaaataaaaagtatgttgtacatactgccgaagaattgtcttgcaagttaaggcttccccctttactataagactataaataaaaacttattttatcctt

SEQ ID NO: 345 - protein, 160 aa, Homo sapiens
MSDNDDIEVESDEEQPRFQSAADKRAHHNALERKRRDHIKDSFHSLRDSVPSLQGEKASRAQILDKATEYIQYMRRKNHTHQQDIDDLKRQNALLEQQVRALEKARSSAQLQTNYPSSDNSLYTNAKGSTISAFDGGSDSSSESEPEEPQSRKKLRMEAS

SEQ ID NO: 346 - DNA, 110 bp, Homo sapiens
ccctcggtggctcctggggatcctggtccctccctgtgactgtggacctgcctggagatgcagtggcacttggactgcaatgctttaccttggacctgaagaatgttacc

SEQ ID NO: 347 - DNA, 3645 bp, Homo sapiens
cctgaagggaggatgggctaaggcaggcacacagtggcggagaagatgccctcctgggccctcttcatggtcacctcctgcctcctcctggcccctcaaaacctggcccaagtcagcagccaagatgtctccttgctggcatcagactcagagcccctgaagtgtttctcccgaacatttgaggacctcacttgcttctgggatgaggaagaggcagcgcccagtgggacataccagctgctgtatgcctacccgcgggagaagccccgtgcttgccccctgagttcccagagcatgccccactttggaacccgatacgtgtgccagtttccagaccaggaggaagtgcgtctcttctttccgctgcacctctgggtgaagaatgtgttcctaaaccagactcggactcagcgagtcctctttgtggacagtgtaggcctgccggctccccccagtatcatcaaggccatgggtgggagccagccaggggaacttcagatcagctgggaggagccagctccagaaatcagtgatttcctgaggtacgaactccgctatggccccagagatcccaagaactccactggtcccacggtcatacagctgattgccacagaaacctgctgccctgctctgcagaggcctcactcagcctctgctctggaccagtctccatgtgctcagcccacaatgccctggcaagatggaccaaagcagacctccccaagtagagaagcttcagctctgacagcagagggtggaagctgcctcatctcaggactccagcctggcaactcctactggctgcagctgcgcagcgaacctgatgggatctccctcggtggctcctggggatcctggtccctccctgtgactgtggacctgcctggagatgcagtggcacttggactgcaatgctttaccttggacctgaagaatgttacctgtcaatggcagcaacaggaccatgctagctcccaaggcttcttctaccacagcagggcacggtgctgccccagagacaggtaccccatctgggagaactgcgaagaggaagagaaaacaaatccaggactacagaccccacagttctctcgctgccacttcaagtcacgaaatgacagcattattcacatccttgtggaggtgaccacagccccgggtactgttcacagctacctgggctcccctttctggatccaccaggctgtgcgcctccccaccccaaacttgcactggagggagatctccagtgggcatctggaattggagtggcagcacccatcgtcctgggcagcccaagagacctgttatcaactccgatacacaggagaaggccatcaggactggaaggtgctggagccgcctctcggggcccgaggagggaccctggagctgcgcccgcgatctcgctaccgtttacagctgcgcgccaggctcaacggccccacctaccaaggtccctggagctcgtggtcggacccaactagggtggagaccgccaccgagaccgcctggatctccttggtgaccgctctgcatctagtgctgggcctcagcgccgtcctgggcctgctgctgctgaggtggcagtttcctgcacactacaggagactgaggcatgccctgtggccctcacttccagacctgcaccgggtcctaggccagtaccttagggacactgcagccctgagcccgcccaaggccacagtctcagatacctgtgaagaagtggaacccagcctccttgaaatcctccccaagtcctcagagaggactcctttgcccctgtgttcctcccaggcccagatggactaccgaagattgcagccttcttgcctggggaccatgcccctgtctgtgtgcccacccatggctgagtcagggtcctgctgtaccacccacattgccaaccattcctacctaccactaagctattggcagcagccttgaggacaggctcctcactcccagttccctggacagagctaaactctcgagacttctctgtgaacttccctaccctacccccacaacacaagcaccccagacctcacctccatccccctctgtctgccctcacaattaggcttcattgcactgatcttactctactgctgctgacataaaaccaggaccctttctccacaggcaggctcatttcactaagctcctcctttactttctctctcctctttgatgtcaaacgccttgaaaacaagcctccacttccccacacttcccatttactcttgagactacttcaattagttcccctactacactttgctagtgaaactgcccaggcaaagtgcacctcaaatcttctaattccaagatccaataggatctcgttaatcatcagttcctttgatctcgctgtaagatttgtcaaggctgactactcacttctcctttaaattctttcctaccttggtcctgcctctttgagtatattagtaggttttttttatttgtttgagacagggtctcactctgtcacccaggctgcagtgcaatggcgcgatctcagctcactgcaacctccacctccgggttcaagcgattcttgtgcctcggcctccctagtagctgggattacaggcgcacaccaccacacacagctaattttttttttttttttttttttttttttttagacggagccttgctctgttgccagactggagtgcagtggcacgatctcggctcactgcaacctctgcctcccgggttcaagccattctgcctcagcctcccaagtagctgggagtacaggcgtctgccaccatgcctaatttttttctatttttaggagagaccggttttcaccacgttggccaggatggtctcgatatcctgatctcgtgatccgcctgcctctgcctcccaaagtgctgggattacaggtgtgacccactgcgcacagccccagctaattttcatatttttagtagagacagggttttgccatgttgcccaggctggtcttgaactcctaacctcgggtgatccacccaccttggcctcccaaagtgttaggattacaggcatgagccactgcgcccggctgagtgtactagtagttaagagaataaactagatctagaatcagagctggattcaattcctgtccttcacatttactagctgtgcaaccttgggcacataacttaatgtctttgagccttagttttttcatctgtaaaacagggataataacagcaccccatagagttgtgacgaggattgagataatctaagtaaagcacagtccctaggacatagtaaatgattcatatatccgaactactgttataattattccttcttactctcctcttctagcatttcttccaattattacagtccttcaagattccatttcttaacagtctccaatcccatctattctctgcctttactatatgttgaccattccaaagttcttatctctagctcagacatctactacagcactgtgatgctttatgcaactaactgtttacatatctgtcccctgctactagattgtgagctccttgagggaaaggaacatgatttatttgtccttttcccccagcacctagagtagtgcttggtgcatgatagtaggccttcaataaattttttctaaatgaatga

SEQ ID NO: 348 - protein, 635 aa, Homo sapiens
MPSWALFMVTSCLLLAPQNLAQVSSQDVSLLASDSEPLKCFSRTFEDLTCFWDEEEAAPSGTYQLLYAYPREKPRACPLSSQSMPHFGTRYVCQFPDQEEVRLFFPLHLWVKNVFLNQTRTQRVLFVDSVGLPAPPSIIKAMGGSQPGELQISWEEPAPEISDFLRYELRYGPRDPKNSTGPTVIQLIATETCCPALQRPHSASALDQSPCAQPTMPWQDGPKQTSPSREASALTAEGGSCLISGLQPGNSYWLQLRSEPDGISLGGSWGSWSLPVTVDLPGDAVALGLQCFTLDLKNVTCQWQQQDHASSQGFFYHSRARCCPRDRYPIWENCEEEEKTNPGLQTPQFSRCHFKSRNDSIIHILVEVTTAPGTVHSYLGSPFWIHQAVRLPTPNLHWREISSGHLELEWQHPSSWAAQETCYQLRYTGEGHQDWKVLEPPLGARGGTLELRPRSRYRLQLRARLNGPTYQGPWSSWSDPTRVETATETAWISLVTALHLVLGLSAVLGLLLLRWQFPAHYRRLRHALWPSLPDLHRVLGQYLRDTAALSPPKATVSDTCEEVEPSLLEILPKSSERTPLPLCSSQAQMDYRRLQPSCLGTMPLSVCPPMAESGSCCTTHIANHSYLPLSYWQQP

SEQ ID NO: 349 - DNA, 108 bp, Homo sapiens
ctggggaggaaggtcctctatctgccgagcttcttcacctacgccaagtacatcgtgcaagtggatggtaagatagggctgttccgaggcctgagtccccggctgatg

SEQ ID NO: 350 - DNA, 2334 bp, Homo sapiens
gcagagaaaactcccgaagccagggaggtggcttggaagcgcctcagaccatattggggacgtctggcagccagaggcgccgaaccccgcccccgcgtgctctgggcatcccgggggagcgccccggcctgcggctgccgccacagctcccgagcccggggccccggctgcccgccaccattgacccccggcccgcagcccagtgtcctgctaggcctccaaccggccggggagccacatccggcgtgtcccacccgccgcaccacgctcccgagctcccccgcggcctggagtggtgcgccccggccccgccccctgacgccggtgagggggcgtggccccgtcacgtgacggggagtgacctcgccgccgggcgccatgggagcttcggacccggaagtggcgccctgggctcgcggcggtgccgcggggatggcgggagccggagctggagccggagctcgcggcggagcggcggcgggggtcgaggctcgagctcgcgatccaccgcccgcgcaccgcgcacatcctcgccaccctcggcctgcggctcagccctcggcccgcaggatggatggcgggtcagggggcctggggtctggggacaacgccccgaccactgaggctcttttcgtggcactgggcgcgggcgtgacggcgctcagccatcccctgctctacgtgaagctgctcatccaggtgggtcatgagccgatgccccccacccttgggaccaatgtgctggggaggaaggtcctctatctgccgagcttcttcacctacgccaagtacatcgtgcaagtggatggtaagatagggctgttccgaggcctgagtccccggctgatgtccaacgccctctctactgtgactcggggtagcatgaagaaggttttccctccagatgagattgagcaggtttccaacaaggatgatatgaagacttccctgaagaaagttgtgaaggagacctcctacgagatgatgatgcagtgtgtgtcccgcatgttggcccaccccctgcatgtcatctcaatgcgctgcatggtccagtttgtgggacgggaggccaagtacagtggtgtgctgagctccattgggaagattttcaaagaggaagggctgctgggattcttcgttggattaatccctcacctcctgggcgatgtggttttcttgtggggctgtaacctgctggcccacttcatcaatgcctacctggtggatgacagcgtgagtgacaccccaggggggctgggaaacgaccagaatccaggttcccagttcagccaggccctggccatccggagctataccaagttcgtgatggggattgcagtgagcatgctgacctaccccttcctgctagttggcgacctcatggctgtgaacaactgcgggctgcaagctgggctccccccttactccccagtgttcaaatcctggattcactgctggaagtacctgagtgtgcagggccagctcttccgaggctccagcctgcttttccgccgggtgtcatcaggatcatgctttgccctggagtaacctgaatcatctaaaaaacacggtctcaacctggccaccgtgggtgaggcctgaccaccttgggacacctgcaagacgactccaacccaacaacaaccagatgtgctccagcccagccgggcttcagttccatatttgccatgtgtctgtccagatgtggggttgagcgggggtggggctgcacccagtggattgggtcacccggcagacctagggaaggtgaggcgaggtggggagttggcagaatccccatacctcgcagatttgctgagtctgtcttgtgcagagggccagagaatggcttatgggggcccaggttggatggggaaaggctaatggggtcagaccccaccccgtctacccctccagtcagcccagcgcccatcctgcagctcagctgggagcatcattctcctgctttgtacatagggtgtggtcccctggcacgtggccaccatcatgtctaggcctatgctaggaggcaaatggccaggctctgcctgtgtttttctcaacactacttttctgatatgagggcagcacctgcctctgaatgggaaatcatgcaactactcagaatgtgtcctcctcatctaatgctcatctgtttaatggtgatgcctcgcgtacaggatctggttacctgtgcagttgtgaatacccagaggttgggcagatcagtgtctctagtcctacccagttttaaagttcatggtaagatttgacctcatctcccgcaaataaatgtattggtgatttggagtttttaaaaaaaaaaaaaaaaaa

SEQ ID NO: 351 - protein, 389 aa, Homo sapiens
MGASDPEVAPWARGGAAGMAGAGAGAGARGGAAAGVEARARDPPPAHRAHPRHPRPAAQPSARRMDGGSGGLGSGDNAPTTEALFVALGAGVTALSHPLLYVKLLIQVGHEPMPPTLGTNVLGRKVLYLPSFFTYAKYIVQVDGKIGLFRGLSPRLMSNALSTVTRGSMKKVFPPDEIEQVSNKDDMKTSLKKVVKETSYEMMMQCVSRMLAHPLHVISMRCMVQFVGREAKYSGVLSSIGKIFKEEGLLGFFVGLIPHLLGDVVFLWGCNLLAHFINAYLVDDSVSDTPGGLGNDQNPGSQFSQALAIRSYTKFVMGIAVSMLTYPFLLVGDLMAVNNCGLQAGLPPYSPVFKSWIHCWKYLSVQGQLFRGSSLLFRRVSSGSCFALE

SEQ ID NO: 352 - DNA, 103 bp, Homo sapiens
actttccttccactggccagcattctcctctattagactagaactgtggataaacctcagaaaatggccacccagcagaaagcctctgacgagaggatctccc

SEQ ID NO: 353 - DNA, 6551 bp, Homo sapiens
tggcacagatctccagaaacccttgtaatttcctgagtgacaggggtgatagaaacatcttttattagaatacttggtcttggttcctgacacaagagcttctaagacctttggaatctccaagtgataagagtgtatgacagtgagctaactggtggctgggatcctttagacaacttcaggatgggggctatcccctgaaagactaaggcatgattagaggtctgggatttgcagccccacgcctcgacctccagagagggtaaaagggctggagattgattaaccaccagttgccagtgatttaaccaatcatgcctaagtgatggcacctccattaaaaaataaaccacaggtttggagagctttcggtttggttaaccccaaccacataccaagaaggcgatgcacctcaaactgcatgaagacaaaaggtcctgtgctcacctgggacccttctggacgttgccctgtgtacctcttcgactgcctgttcatctacgacgaaccccgggtattgaccccagacaacaatgccacttcatattggggacttcgtctgggattccaaggtgcattcattgcaaagttccttaaatattttctcactgcttcctactaaaggacggacagagcatttgttcttcagccacatactttccttccactggccagcattctcctctattagactagaactgtggataaacctcagaaaatggccacccagcagaaagcctctgacgagaggatctcccagtttgatcacaatttgctgccagagctgtctgctcttctgggcctagatgcagttcagttggcaaaggaactagaagaagaggagcagaaggagcgagcaaaaatgcagaaaggctacaactctcaaatgcgcagtgaagcaaaaaggttaaagacttttgtgacttatgagccgtacagctcatggataccacaggagatggcggccgctgggttttacttcactggggtaaaatctgggattcagtgcttctgctgtagcctaatcctctttggtgccggcctcacgagactccccatagaagaccacaagaggtttcatccagattgtgggttccttttgaacaaggatgttggtaacattgccaagtacgacataagggtgaagaatctgaagagcaggctgagaggaggtaaaatgaggtaccaagaagaggaggctagacttgcgtccttcaggaactggccattttatgtccaagggatatccccttgtgtgctctcagaggctggctttgtctttacaggtaaacaggacacggtacagtgtttttcctgtggtggatgtttaggaaattgggaagaaggagatgatccttggaaggaacatgccaaatggttccccaaatgtgaatttcttcggagtaagaaatcctcagaggaaattacccagtatattcaaagctacaagggatttgttgacataacgggagaacattttgtgaattcctgggtccagagagaattacctatggcatcagcttattgcaatgacagcatctttgcttacgaagaactacggctggactcttttaaggactggccccgggaatcagctgtgggagttgcagcactggccaaagcaggtcttttctacacaggtataaaggacatcgtccagtgcttttcctgtggagggtgtttagagaaatggcaggaaggtgatgacccattagacgatcacaccagatgttttcccaattgtccatttctccaaaatatgaagtcctctgcggaagtgactccagaccttcagagccgtggtgaactttgtgaattactggaaaccacaagtgaaagcaatcttgaagattcaatagcagttggtcctatagtgccagaaatggcacagggtgaagcccagtggtttcaagaggcaaagaatctgaatgagcagctgagagcagcttataccagcgccagtttccgccacatgtctttgcttgatatctcttccgatctggccacggaccacttgctgggctgtgatctgtctattgcttcaaaacacatcagcaaacctgtgcaagaacctctggtgctgcctgaggtctttggcaacttgaactctgtcatgtgtgtggagggtgaagctggaagtggaaagacggtcctcctgaagaaaatagcttttctgtgggcatctggatgctgtcccctgttaaacaggttccagctggttttctacctctcccttagttccaccagaccagacgaggggctggccagtatcatctgtgaccagctcctagagaaagaaggatctgttactgaaatgtgcgtgaggaacattatccagcagttaaagaatcaggtcttattccttttagatgactacaaagaaatatgttcaatccctcaagtcataggaaaactgattcaaaaaaaccacttatcccggacctgcctattgattgctgtccgtacaaacagggccagggacatccgccgatacctagagaccattctagagatcaaagcatttcccttttataatactgtctgtatattacggaagctcttttcacataatatgactcgtctgcgaaagtttatggtttactttggaaagaaccaaagtttgcagaagatacagaaaactcctctctttgtggcggcgatctgtgctcattggtttcagtatccttttgacccatcctttgatgatgtggctgttttcaagtcctatatggaacgcctttccttaaggaacaaagcgacagctgaaattctcaaagcaactgtgtcctcctgtggtgagctggccttgaaagggtttttttcatgttgctttgagtttaatgatgatgatctcgcagaagcaggggttgatgaagatgaagatctaaccatgtgcttgatgagcaaatttacagcccagagactaagaccattctaccggtttttaagtcctgccttccaagaatttcttgcggggatgaggctgattgaactcctggattcagataggcaggaacatcaagatttgggactgtatcatttgaaacaaatcaactcacccatgatgactgtaagcgcctacaacaattttttgaactatgtctccagcctcccttcaacaaaagcagggcccaaaattgtgtctcatttgctccatttagtggataacaaagagtcattggagaatatatctgaaaatgatgactacttaaagcaccagccagaaatttcactgcagatgcagttacttaggggattgtggcaaatttgtccacaagcttacttttcaatggtttcagaacatttactggttcttgccctgaaaactgcttatcaaagcaacactgttgctgcgtgttctccatttgttttgcaattccttcaagggagaacactgactttgggtgcgcttaacttacagtactttttcgaccacccagaaagcttgtcattgttgaggagcatccacttcccaatacgaggaaataagacatcacccagagcacatttttcagttctggaaacatgttttgacaaatcacaggtgccaactatagatcaggactatgcttctgcctttgaacctatgaatgaatgggagcgaaatttagctgaaaaagaggataatgtaaagagctatatggatatgcagcgcagggcatcaccagaccttagtactggctattggaaactttctccaaagcagtacaagattccctgtctagaagtcgatgtgaatgatattgatgttgtaggccaggatatgcttgagattctaatgacagttttctcagcttcacagcgcatcgaactccatttaaaccacagcagaggctttatagaaagcatccgcccagctcttgagctgtctaaggcctctgtcaccaagtgctccataagcaagttggaactcagcgcagccgaacaggaactgcttctcaccctgccttccctggaatctcttgaagtctcagggacaatccagtcacaagaccaaatctttcctaatctggataagttcctgtgcctgaaagaactgtctgtggatctggagggcaatataaatgttttttcagtcattcctgaagaatttccaaacttccaccatatggagaaattattgatccaaatttcagctgagtatgatccttccaaactagtaaaattaattcaaaattctccaaaccttcatgttttccatctgaagtgtaacttcttttcggattttgggtctctcatgactatgcttgtttcctgtaagaaactcacagaaattaagttttcggattcattttttcaagccgtcccatttgttgccagtttgccaaattttatttctctgaagatattaaatcttgaaggccagcaatttcctgatgaggaaacatcagaaaaatttgcctacattttaggttctcttagtaacctggaagaattgatccttcctactggggatggaatttatcgagtggccaaactgatcatccagcagtgtcagcagcttcattgtctccgagtcctctcatttttcaagactttgaatgatgacagcgtggtggaaattgccaaagtagcaatcagtggaggtttccagaaacttgagaacctaaagctttcaatcaatcacaagattacagaggaaggatacagaaatttctttcaagcactggacaacatgccaaacttgcaggagttggacatctccaggcatttcacagagtgtatcaaagctcaggccacaacagtcaagtctttgagtcaatgtgtgttacgactaccaaggctcattagactgaacatgttaagttggctcttggatgcagatgatattgcattgcttaatgtcatgaaagaaagacatcctcaatctaagtacttaactattctccagaaatggatactgccgttctctccaatcattcagaaataaaagattcagctaaaaactgctgaatcaataatttgtcttggggcatattgaggatgtaaaaaaagttgttgattaatgctaaaaaccaaattatccaaaattattttattaaatattgcatacaaaagaaaatgtgtaaggcttgctaaaaaacaaaacaaaacaaaacacagtcctgcatactcaccaccaagctcaagaaataaatcatcaccaatacctttgaggtccctgagtaatccaccccagctaaaggcaaacccttcaatcaagtttatacagcaaaccctccattgtccatggtcaacagggaaggggttggggacaggtctgccaatctatctaaaagccacaatatggaagaagtattcaatttatataataaatggctaacttaacggttgaatcactttcatacatggatgaaacgggtttaacacaggatccacatgaatcttctgtgggccaagagatgttccttaatccttgtagaacctgttttctatattgaactagctttggtacagtagagttaacttactttccatttatccactgccaatataaagaggaaacaggggttagggaaaaatgacttcattccagaggcttctcagagttcaacatatgctataatttagaattttcttatgaatccactctacttgggtagaaaatattttatctctagtgattgcatattatttccatatcatagtatttcatagtattatatttgatatgagtgtctatatcaatgtcagtgtccagaatttcgttcctaccagttaagtagttttctgaacggccagaagaccattcgaaattcatgatactactataagttggtaaacaaccatacttttatcctcatttttattctcactaagaaaaaagtcaactcccctccccttgcccaagtatgaaatatagggacagtatgtatggtgtggtctcatttgtttagaaaaccacttatgactgggtgcggtggctcacacctgtaatcccagcactttgggaggctgaggcgggcgaatcatttgaggtgaggaattcgagaccagcctggccagcatggtgaaaccccatctctactaaaaatacaaaaattagccaggtgtggtggcacatgcctgtagtcccagccactagggcggctgagacgcaagacttgcttgaacccgggaggcagaggttgcagtgagccaagatggcgccactgcattccagcctgggcaacagagcaagaccctgtctgtctcaaaacaaaaaacaaaaccacttatattgctagctacattaagaatttctgaatatgttactgagcttgcttgtggtaaccatttataatatcagaaagtatatgtacaccaaaacatgttgaacatccatgttgtacaactgaaatataaataattttgtcaattatacctaaataaaactggaaaaaaatttctggaagtttatatctaaaaatgttaatagtgcgtacctctaggaagtgggcctggaagccattcttacttttcagtctctcccattctgtactgttttttgttttactttcgtgcctgcattatttttctatttaaaacaaaaataaatctagtttagcact

SEQ ID NO: 354 - protein, 1403 aa, Homo sapiens
MATQQKASDERISQFDHNLLPELSALLGLDAVQLAKELEEEEQKERAKMQKGYNSQMRSEAKRLKTFVTYEPYSSWIPQEMAAAGFYFTGVKSGIQCFCCSLILFGAGLTRLPIEDHKRFHPDCGFLLNKDVGNIAKYDIRVKNLKSRLRGGKMRYQEEEARLASFRNWPFYVQGISPCVLSEAGFVFTGKQDTVQCFSCGGCLGNWEEGDDPWKEHAKWFPKCEFLRSKKSSEEITQYIQSYKGFVDITGEHFVNSWVQRELPMASAYCNDSIFAYEELRLDSFKDWPRESAVGVAALAKAGLFYTGIKDIVQCFSCGGCLEKWQEGDDPLDDHTRCFPNCPFLQNMKSSAEVTPDLQSRGELCELLETTSESNLEDSIAVGPIVPEMAQGEAQWFQEAKNLNEQLRAAYTSASFRHMSLLDISSDLATDHLLGCDLSIASKHISKPVQEPLVLPEVFGNLNSVMCVEGEAGSGKTVLLKKIAFLWASGCCPLLNRFQLVFYLSLSSTRPDEGLASIICDQLLEKEGSVTEMCVRNIIQQLKNQVLFLLDDYKEICSIPQVIGKLIQKNHLSRTCLLIAVRTNRARDIRRYLETILEIKAFPFYNTVCILRKLFSHNMTRLRKFMVYFGKNQSLQKIQKTPLFVAAICAHWFQYPFDPSFDDVAVFKSYMERLSLRNKATAEILKATVSSCGELALKGFFSCCFEFNDDDLAEAGVDEDEDLTMCLMSKFTAQRLRPFYRFLSPAFQEFLAGMRLIELLDSDRQEHQDLGLYHLKQINSPMMTVSAYNNFLNYVSSLPSTKAGPKIVSHLLHLVDNKESLENISENDDYLKHQPEISLQMQLLRGLWQICPQAYFSMVSEHLLVLALKTAYQSNTVAACSPFVLQFLQGRTLTLGALNLQYFFDHPESLSLLRSIHFPIRGNKTSPRAHFSVLETCFDKSQVPTIDQDYASAFEPMNEWERNLAEKEDNVKSYMDMQRRASPDLSTGYWKLSPKQYKIPCLEVDVNDIDVVGQDMLEILMTVFSASQRIELHLNHSRGFIESIRPALELSKASVTKCSISKLELSAAEQELLLTLPSLESLEVSGTIQSQDQIFPNLDKFLCLKELSVDLEGNINVFSVIPEEFPNFHHMEKLLIQISAEYDPSKLVKLIQNSPNLHVFHLKCNFFSDFGSLMTMLVSCKKLTEIKFSDSFFQAVPFVASLPNFISLKILNLEGQQFPDEETSEKFAYILGSLSNLEELILPTGDGIYRVAKLIIQQCQQLHCLRVLSFFKTLNDDSVVEIAKVAISGGFQKLENLKLSINHKITEEGYRNFFQALDNMPNLQELDISRHFTECIKAQATTVKSLSQCVLRLPRLIRLNMLSWLLDADDIALLNVMKERHPQSKYLTILQKWILPFSPIIQK

SEQ ID NO: 355 - DNA, 102 bp, Homo sapiens
acttcacccccaacaagacagaggacacgatctttctcagagagtaccagacccgacaggaccagtgcatctataacaccacctacctgaatgtccagcggg

SEQ ID NO: 356 - DNA, 847 bp, Homo sapiens
acagagtaaacttttgctgggctccaagtgaccgcccatagtttattataaaggtgactgcaccctgcagccaccagcactgcctggctccacgtgcctcctggtctcagtatggcgctgtcctgggttcttacagtcctgagcctcctacctctgctggaagcccagatcccattgtgtgccaacctagtaccggtgcccatcaccaacgccaccctggaccggatcactggcaagtggttttatatcgcatcggcctttcgaaacgaggagtacaataagtcggttcaggagatccaagcaaccttcttttacttcacccccaacaagacagaggacacgatctttctcagagagtaccagacccgacaggaccagtgcatctataacaccacctacctgaatgtccagcgggaaaatgggaccatctccagatacgtgggaggccaagagcatttcgctcacttgctgatcctcagggacaccaagacctacatgcttgcttttgacgtgaacgatgagaagaactgggggctgtctgtctatgctgacaagccagagacgaccaaggagcaactgggagagttctacgaagctctcgactgcttgcgcattcccaagtcagatgtcgtgtacaccgattggaaaaaggataagtgtgagccactggagaagcagcacgagaaggagaggaaacaggaggagggggaatcctagcaggacacagccttggatcaggacagagacttgggggccatcctgcccctccaacccgacatgtgtacctcagctttttccctcacttgcatcaataaagcttctgtgtttggaacagctaaaaaaaaaa

SEQ ID NO: 357 - protein, 201 aa, Homo sapiens
MALSWVLTVLSLLPLLEAQIPLCANLVPVPITNATLDRITGKWFYIASAFRNEEYNKSVQEIQATFFYFTPNKTEDTIFLREYQTRQDQCIYNTTYLNVQRENGTISRYVGGQEHFAHLLILRDTKTYMLAFDVNDEKNWGLSVYADKPETTKEQLGEFYEALDCLRIPKSDVVYTDWKKDKCEPLEKQHEKERKQEEGES

SEQ ID NO: 358 - DNA, 110 bp, Homo sapiens
gtcctgagcctcctacctctgctggaagcccagatcccattgtgtgccaacctagtaccggtgcccatcaccaacgccaccctggaccggatcactggcaagtggtttta

SEQ ID NO: 359 - DNA, 844 bp, Homo sapiens
cagacacagagtaaacttttgctgggctccaagtgaccgcccatagtttattataaaggtgactgcaccctgcagccaccagcactgcctggctccacgtgcctcctggtctcagtatggcgctgtcctgggttcttacagtcctgagcctcctacctctgctggaagcccagatcccattgtgtgccaacctagtaccggtgcccatcaccaacgccaccctggaccggatcactggcaagtggttttatatcgcatcggcctttcgaaacgaggagtacaataagtcggttcaggagatccaagcaaccttcttttactttacccccaacaagacagaggacacgatctttctcagagagtaccagacccgccagaaccagtgcttctataactccagttacctgaatgtccagcgggagaatgggaccgtctccagatacgagggaggccgagaacatgttgctcacctgctgttccttagggacaccaagaccttgatgtttggttcctacctggacgatgagaagaactgggggctgtctttctatgctgacaagccagagacgaccaaggagcaactgggagagttctacgaagctctcgactgcttgtgcattcccaggtcagatgtcatgtacaccgactggaaaaaggataagtgtgagccactggagaagcagcacgagaaggagaggaaacaggaggagggggaatcctagcaggacacagccttggatcaggacagagacttgggggccatcctgcccctccaacccgacatgtgtacctcagctttttccctcacttgcatcaataaagcttctgtgtttggaacagctaa

SEQ ID NO: 360 - protein, 201 aa, Homo sapiens
MALSWVLTVLSLLPLLEAQIPLCANLVPVPITNATLDRITGKWFYIASAFRNEEYNKSVQEIQATFFYFTPNKTEDTIFLREYQTRQNQCFYNSSYLNVQRENGTVSRYEGGREHVAHLLFLRDTKTLMFGSYLDDEKNWGLSFYADKPETTKEQLGEFYEALDCLCIPRSDVMYTDWKKDKCEPLEKQHEKERKQEEGES

SEQ ID NO: 361 - DNA, 103 bp, Homo sapiens
aatgtgtataaagttggctgatatcaatggtccagctaaatgtaaagaactccatcttcagtggacagatggtattgtcaatgaattttatgaacagggtgat

SEQ ID NO: 362 - DNA, 7319 bp, Homo sapiens
gggggccactgggaattcagtgaagagggcaccctataccatggcagtgcccggcgacgctgcacgagtcagggacaagcccgtccacagtggggtgagtcaagcccccacggcgggccgggactgccaccatcgtgcggaccccgcatcgccgcgggactcgggctgccgtggctgctggggagacctggtgctgcagccgctccggagctctcggaaactttcctccgcgctgtgcgcgggctccctgtcctttctgctggcgctgctggtgaggctggtccgcggggaggtcggctgtgacctggagcagtgtaaggaggcggcggcggcggaggaggaggaagcagccccgggagcagaagggggcgtcttcccggggcctcggggaggtgctcccgggggcggtgcgcggctcagcccctggctgcagccctcggcgctgctcttcagtctcctgtgtgccttcttctggatgggcttgtacctcctgcgcgccggggtgcgcctgcctctggctgtcgcgctgctggccgcctgctgcgggggggaagcgctcgtccagattgggctgggcgtcggggaggatcacttactctcactccccgccgcgggggtggtgctcagctgcttggccgccgcgacatggctggtgctgaggctgaggctgggcgtcctcatgatcgccttgactagcgcggtcaggaccgtgtccctcatttccttagagaggttcaaggtcgcctggagaccttacctggcgtacctggccggcgtgctggggatcctcttggccaggtacgtggaacaaatcttgccgcagtccgcggaggcggctccaagggagcatttggggtcccagctgattgctgggaccaaggaagatatcccggtgtttaagaggaggaggcggtccagctccgtcgtgtccgccgagatgtccggctgcagcagcaagtcccatcggaggacctccctgccctgtataccgagggaacagctcatggggcattcagaatgggaccacaaacgagggccaagaggatcacagtcttcaggaaccagtattactgtggacatcgccgtcatgggcgaggcccacggcctcattaccgacctcctggcagacccttctcttccaccaaacgtgtgcacatccttgagagccgtgagcaacttgctcagcacacagctcaccttccaggccattcacaagcccagagtgaatcccgtcacttcgctcagtgaaaactatacctgttctgactctgaagagagctctgaaaaagacaagcttgctattccaaagcgcctgagaaggagtttgcctcctggcttgttgagacgagtttcttccacttggaccaccaccacctcggccacaggtctacccaccttggagcctgcaccagtacggagagaccgcagcaccagcatcaaactgcaggaagcaccttcatccagtcctgattcttggaataatccagtgatgatgaccctcaccaaaagcagatcctttacttcatcctatgctatttctgcagctaaccatgtaaaggctaaaaagcaaagtcgaccaggtgccctcgctaaaatttcacctctttcatcgccctgctcctcacctctccaagggactcctgccagcagcctggtcagcaaaatttctgcagtgcagtttccagaatctgctgacacaactgccaaacaaagcctaggttctcacagggccttaacttacactcagagtgccccagacctatcccctcaaatcctgactccacctgttatatgtagcagctgtggcagaccatattcccaagggaatcctgctgatgagcccctggagagaagtggggtagccactcggacaccaagtagaacagatgacactgctcaagttacctctgattatgaaaccaataacaacagtgacagcagtgacattgtacagaatgaagatgaaacagagtgcctgagagagcctctgaggaaagcatcggcttgcagcacctatgctcctgagaccatgatgtttctggacaaaccaattcttgctcccgaacctcttgtcatggataacctggactcaattatggagcagctaaatacttggaattttccaatttttgatttagtggaaaatataggaagaaaatgtggccgtattcttagtcaggtatcttacagactttttgaagacatgggcctctttgaagcttttaaaattccaattagggaatttatgaattattttcatgctttggagattggatatagggatattccttatcataacagaatccatgccactgatgttttacatgctgtttggtatcttactacacagcctattccaggcctctcaactgtgattaatgatcatggttcaaccagtgattcagattctgacagtggatttacacatggacatatgggatatgtattctcaaaaacgtataatgtgacagatgataaatacggatgtctgtctgggaatatccctgccttggagttgatggcgctgtatgtggctgcagccatgcacgattatgatcatccaggaaggactaatgctttcctggttgcaactagtgctcctcaggcggtgctatataacgatcgttcagttttggagaatcatcacgcagctgctgcatggaatcttttcatgtcccggccagagtataacttcttaattaaccttgaccatgtggaatttaagcatttccgtttccttgtcattgaagcaattttggccactgacctgaagaaacactttgacttcgtagccaaatttaatggcaaggtaaatgatgatgttggaatagattggaccaatgaaaatgatcgtctactggtttgtcaaatgtgtataaagttggctgatatcaatggtccagctaaatgtaaagaactccatcttcagtggacagatggtattgtcaatgaattttatgaacagggtgatgaagaggccagccttggattacccataagccccttcatggatcgttctgctcctcagctggccaaccttcaggaatccttcatctctcacattgtggggcctctgtgcaactcctatgattcagcaggactaatgcctggaaaatgggtggaagacagcgatgagtcaggagatactgatgacccagaagaagaggaggaagaagcaccagcaccaaatgaagaggaaacctgtgaaaataatgaatctccaaaaaagaagactttcaaaaggagaaaaatctactgccaaataactcagcacctcttacagaaccacaagatgtggaagaaagtcattgaagaggagcaacggttggcaggcatagaaaatcaatccctggaccagacccctcagtcgcactcttcagaacagatccaggctatcaaggaagaagaagaagagaaagggaaaccaagaggcgaggagataccaacccaaaagccagaccagtgacaatggatagaatgggctgtgtttccaaacagattgacttgtcaaagactctcttcaagccagcacaacatttagacacaacactgtagaaatttgagatgggcaaatggctattgcattttgggattcttcgcattttgtgtgtatatttttacagtgaggtacattgttaaaaactttttgctcaaagaagctttcacattgcaacaccagcttctaaggattttttaaggagggaatatatatgtgtgtgtgtatataagctcccacatagatacatgtaaaacatattcacacccatgcacgcacacacatacacactgaaggccacgattgctggctccacaatttagtaacatttatattaagatatatatatagtggtcactgtgatataataaatcataaaggaaaccaaatcacaaaggagatggtgtggcttagcaaggaaacagtgcaggaaatgtaggttaccaactaagcagcttttgctcttagtactgagggatgaaagttccagagcattatttgaattctgatacatcctgccaacactgtgtgtgtgtgtgtgtgtgtgtgtgtgtgtgtgtgtgtgtgtgaaagagagacagaagggaatggtttgagagggtgcttgtgtgcatgtgtgtgcatatgtaaagagatttttgtggtttaagtaactcagaatagctgtagcaaatgactgaatacatgtgaacaaacagaaggaagttcactctggagtgtctttgggaggcagccattccaaatgccctcctccatttagcttcaataaagggccttttgctgatggagggcactcaagggctgggtgagagggccacgtgtttggtattacattactgctatgcaccacttgaaggagctctatcaccagcctcaaacccgaaagactgaggcattttccagtctacttgcctaatgaatgtataggaactgtctatgagtatggatgtcactcaactaagatcaaatcaccatttaaggggatggcattctttatacctaaacacctaagagctgaagtcaggtcttttaatcaggttagaattctaaatgatgccagagaaggcttgggaaattgtacttcagcgtgatagcctgtgtcttcttaatttgctgcaaaatatgtggtagagaaagaaaaggaaacagaaaaatcactctgggttatatagcaagagatgaaggagaatatttcaacacagggtttttgtgttgacataggaaaagcctgattcttggcaactgttgtagtttgtctttcaggggtgaaggtcccactgacaacccctgttgtggtgttccacacgctgtttgttggggtagcttccatcggcagtctggcccattgtcagtcatgcttcttctggccggggagattatagagagattgtttgaagattgggttattattgaaagtctttttttttgtttgttttgttttggtttgtttgtttatctacacttgtttatgctgtgagccaaacctctatttaaaaagttgatactcactttcaatattttatttcatattattatatatgtcatgatagttatcttgatgtaaatatgaagatttttttgtttctgtagatagtaaactctttttttaaaaaaggaaaagggaaacatttttataaagttatattttaatcaccatttttatacattgtagttctctccaagcccagtaagagaatgatgattcatttgcatggaggtcgatggacaaccaatcatctaccttttctaatttaaatgataatctgatatagttttattgccagttaaatgaggatgctgcaaagcatgttttttcactagtaacttttgctaactgaatgaattctgggtccatatctcccagatgaaaaactgttaaccaataccatattttatagttggtgtccatttctttccaacactgtttgttatgattcttccttgagtacttatatacagacctgctcattatctaaacaatcttaccttctaagtaaaccttgattgtgatttccagtttttattttctctgacgtagtagaaaggaatgtttacattaaaaatacttttgtttctcataaatggatattgtactcccccctttcaaagcattattttacaataattcatggcattttaaaaaataaggcaaagataatacgacaaaaaatatacatggtttcaaggcaaattctccaataagttggaaaatgtaaaaaggatcaagtggatgcagcctctacctaaataattaaaatatatttcagtatatttctgaattaacaccaggtcttcattatttagaacttactaaattgttttcattttcttagttttacctgtgtatctccatgtttgcaaaaattactataagtcaaattttgccagtgaatttaactatttttctttccttgcaattaaggggaaaaaagcatttatcttatcttctcataccccttgcatctaagtacttagcaaagtcaatattttcccattttccaaatgcgtccatctctaacataaatattaattgaacatagagctatgtttggagtgagtggactggcaggacagttggaagtccatcacagtctattgacagtttcatcaaagctgtatagtccaactagtggggcagcttggctactatggtggaagtctcagcaaactgcctggttttgtttgtttgttttgttttaaggtacaggaaataagaggaataatagtggccaaagcaattagaacatcttcattccagaactgtgttcagcaatccaggcagattgatacatttttctttaaaaataaattgctattacagctagacgtcaattgggataaataaagggatgaagatccactaagtttgtgactttcatacacacccagtacatctcaaaggatgctaagggacattttctgccagtagagttctccccctttttggtgacagcaatattattatgttcacatctaactccagagcttacttcctgtggtgccaatgtatttgttgcaatttactacatttttatatgagcctatttataggtgccattaaactcaggtctttcaaatgaaagagtttctagcccacttagggaaaaagataattgtttagaaaaccataaaatcaatggtaggaaaagttggaactggttacctggatgccatggttctctgttaaataaagtaagagaccaggtgtattctgagtgtcatcagtgttattttcagcatgctaataaatgtctttccggttatatatctatctaaattaacctttaaaatattggtttccttgataaaagcaccacttttgcttttgttagctgtaatattttttgtcatttagataagacctggtttggctctcaataaaagatgaagacagtagctctgtacagggatatatctatattagtcttcatctgatgaatgaagaaattttctcatattatgttcaagaaagtatttacttcctaaaaatagaattcccgattctgtctattttggttgaataccagaacaaatctttccgttgcaatcccagtaaaacgaaagaaaaggaatatcttacagactgttcatattagatgtatgtagactgttaatttgcaatttccccatatttcctgcctatcttacccagataactttctttgaaggtaaaagctgtgcaaaaggcatgagactcaggcctactctttgtttaaatgatggaaaaatataaattattttctaagtaataaaagtataaaaattatcattataaataaagtctaaagtttgaaattattaatttaaaaaaaaaaaaaaaaaa

SEQ ID NO: 363 - protein, 1141 aa, Homo sapiens
MAVPGDAARVRDKPVHSGVSQAPTAGRDCHHRADPASPRDSGCRGCWGDLVLQPLRSSRKLSSALCAGSLSFLLALLVRLVRGEVGCDLEQCKEAAAAEEEEAAPGAEGGVFPGPRGGAPGGGARLSPWLQPSALLFSLLCAFFWMGLYLLRAGVRLPLAVALLAACCGGEALVQIGLGVGEDHLLSLPAAGVVLSCLAAATWLVLRLRLGVLMIALTSAVRTVSLISLERFKVAWRPYLAYLAGVLGILLARYVEQILPQSAEAAPREHLGSQLIAGTKEDIPVFKRRRRSSSVVSAEMSGCSSKSHRRTSLPCIPREQLMGHSEWDHKRGPRGSQSSGTSITVDIAVMGEAHGLITDLLADPSLPPNVCTSLRAVSNLLSTQLTFQAIHKPRVNPVTSLSENYTCSDSEESSEKDKLAIPKRLRRSLPPGLLRRVSSTWTTTTSATGLPTLEPAPVRRDRSTSIKLQEAPSSSPDSWNNPVMMTLTKSRSFTSSYAISAANHVKAKKQSRPGALAKISPLSSPCSSPLQGTPASSLVSKISAVQFPESADTTAKQSLGSHRALTYTQSAPDLSPQILTPPVICSSCGRPYSQGNPADEPLERSGVATRTPSRTDDTAQVTSDYETNNNSDSSDIVQNEDETECLREPLRKASACSTYAPETMMFLDKPILAPEPLVMDNLDSIMEQLNTWNFPIFDLVENIGRKCGRILSQVSYRLFEDMGLFEAFKIPIREFMNYFHALEIGYRDIPYHNRIHATDVLHAVWYLTTQPIPGLSTVINDHGSTSDSDSDSGFTHGHMGYVFSKTYNVTDDKYGCLSGNIPALELMALYVAAAMHDYDHPGRTNAFLVATSAPQAVLYNDRSVLENHHAAAAWNLFMSRPEYNFLINLDHVEFKHFRFLVIEAILATDLKKHFDFVAKFNGKVNDDVGIDWTNENDRLLVCQMCIKLADINGPAKCKELHLQWTDGIVNEFYEQGDEEASLGLPISPFMDRSAPQLANLQESFISHIVGPLCNSYDSAGLMPGKWVEDSDESGDTDDPEEEEEEAPAPNEEETCENNESPKKKTFKRRKIYCQITQHLLQNHKMWKKVIEEEQRLAGIENQSLDQTPQSHSSEQIQAIKEEEEEKGKPRGEEIPTQKPDQ

SEQ ID NO: 364 - DNA, 104 bp, Homo sapiens
ccatgagggccagcagcttcttgatcgtggtggtgttcctcatcgctgggacgctggttctagaggcagctgtcacgggagttcctgttaaaggtcaagacact

SEQ ID NO: 365 - DNA, 551 bp, Homo sapiens
gccaaacaccttcctgacaccatgagggccagcagcttcttgatcgtggtggtgttcctcatcgctgggacgctggttctagaggcagctgtcacgggagttcctgttaaaggtcaagacactgtcaaaggccgtgttccattcaatggacaagatcccgttaaaggacaagtttcagttaaaggtcaagataaagtcaaagcgcaagagccagtcaaaggtccagtctccactaagcctggctcctgccccattatcttgatccggtgcgccatgttgaatccccctaaccgctgcttgaaagatactgactgcccaggaatcaagaagtgctgtgaaggctcttgcgggatggcctgtttcgttccccagtgagagggagccggtccttgctgcacctgtgccgtccccagagctacaggccccatctggtcctaagtccctgctgcccttccccttcccacactgtccattcttcctcccattcaggatgcccacggctggagctgcctctctcatccactttccaataaagagttccttctgctcca

SEQ ID NO: 366 - protein, 117 aa, Homo sapiens
MRASSFLIVVVFLIAGTLVLEAAVTGVPVKGQDTVKGRVPFNGQDPVKGQVSVKGQDKVKAQEPVKGPVSTKPGSCPIILIRCAMLNPPNRCLKDTDCPGIKKCCEGSCGMACFVPQ

SEQ ID NO: 367 - DNA, 109 bp, Homo sapiens
gagttattcatcgagacctcaagctgggcaaccttttcctgaatgaagatctggaggtgaaaataggggattttggactggcaaccaaagtcgaatatgacggggagag

SEQ ID NO: 368 - DNA, 2160 bp, Homo sapiens
ggaggctctgctcggatcgaggtctgcagcgcagcttcgggagcatgagtgctgcagtgactgcagggaagctggcacgggcaccggccgaccctgggaaagccggggtccccggagttgcagctcccggagctccggcggcggctccaccggcgaaagagatcccggaggtcctagtggacccacgcagccggcggcgctatgtgcggggccgctttttgggcaagggcggctttgccaagtgcttcgagatctcggacgcggacaccaaggaggtgttcgcgggcaagattgtgcctaagtctctgctgctcaagccgcaccagagggagaagatgtccatggaaatatccattcaccgcagcctcgcccaccagcacgtcgtaggattccacggctttttcgaggacaacgacttcgtgttcgtggtgttggagctctgccgccggaggtctctcctggagctgcacaagaggaggaaagccctgactgagcctgaggcccgatactacctacggcaaattgtgcttggctgccagtacctgcaccgaaaccgagttattcatcgagacctcaagctgggcaaccttttcctgaatgaagatctggaggtgaaaataggggattttggactggcaaccaaagtcgaatatgacggggagaggaagaagaccctgtgtgggactcctaattacatagctcccgaggtgctgagcaagaaagggcacagtttcgaggtggatgtgtggtccattgggtgtatcatgtataccttgttagtgggcaaaccaccttttgagacttcttgcctaaaagagacctacctccggatcaagaagaatgaatacagtattcccaagcacatcaaccccgtggccgcctccctcatccagaagatgcttcagacagatcccactgcccgcccaaccattaacgagctgcttaatgacgagttctttacttctggctatatccctgcccgtctccccatcacctgcctgaccattccaccaaggttttcgattgctcccagcagcctggaccccagcaaccggaagcccctcacagtcctcaataaaggcttggagaaccccctgcctgagcgtccccgggaaaaagaagaaccagtggttcgagagacaggtgaggtggtcgactgccacctcagtgacatgctgcagcagctgcacagtgtcaatgcctccaagccctcggagcgtgggctggtcaggcaagaggaggctgaggatcctgcctgcatccccatcttctgggtcagcaagtgggtggactattcggacaagtacggccttgggtatcagctctgtgataacagcgtgggggtgctcttcaatgactcaacacgcctcatcctctacaatgatggtgacagcctgcagtacatagagcgtgacggcactgagtcctacctcaccgtgagttcccatcccaactccttgatgaagaagatcaccctccttaaatatttccgcaattacatgagcgagcacttgctgaaggcaggtgccaacatcacgccgcgcgaaggtgatgagctcgcccggctgccctacctacggacctggttccgcacccgcagcgccatcatcctgcacctcagcaacggcagcgtgcagatcaacttcttccaggatcacaccaagctcatcttgtgcccactgatggcagccgtgacctacatcgacgagaagcgggacttccgcacataccgcctgagtctcctggaggagtacggctgctgcaaggagctggccagccggctccgctacgcccgcactatggtggacaagctgctgagctcacgctcggccagcaaccgtctcaaggcctcctaatagctgccctcccctccggactggtgccctcctcactcccacctgcatctggggcccatactggttggctcccgcggtgccatgtctgcagtgtgccccccagccccggtggctgggcagagctgcatcatccttgcaggtgggggttgctgtataagttatttttgtacatgttcgggtgtgggttctacagccttgtccccctccccctcaaccccaccatatgaattgtacagaatatttctattgaattcggaactgtcctttccttggctttatgcacattaaacagatgtgaatattc

SEQ ID NO: 369 - protein, 603 aa, Homo sapiens
MSAAVTAGKLARAPADPGKAGVPGVAAPGAPAAAPPAKEIPEVLVDPRSRRRYVRGRFLGKGGFAKCFEISDADTKEVFAGKIVPKSLLLKPHQREKMSMEISIHRSLAHQHVVGFHGFFEDNDFVFVVLELCRRRSLLELHKRRKALTEPEARYYLRQIVLGCQYLHRNRVIHRDLKLGNLFLNEDLEVKIGDFGLATKVEYDGERKKTLCGTPNYIAPEVLSKKGHSFEVDVWSIGCIMYTLLVGKPPFETSCLKETYLRIKKNEYSIPKHINPVAASLIQKMLQTDPTARPTINELLNDEFFTSGYIPARLPITCLTIPPRFSIAPSSLDPSNRKPLTVLNKGLENPLPERPREKEEPVVRETGEVVDCHLSDMLQQLHSVNASKPSERGLVRQEEAEDPACIPIFWVSKWVDYSDKYGLGYQLCDNSVGVLFNDSTRLILYNDGDSLQYIERDGTESYLTVSSHPNSLMKKITLLKYFRNYMSEHLLKAGANITPREGDELARLPYLRTWFRTRSAIILHLSNGSVQINFFQDHTKLILCPLMAAVTYIDEKRDFRTYRLSLLEEYGCCKELASRLRYARTMVDKLLSSRSASNRLKAS

SEQ ID NO: 370 - DNA, 103 bp, Homo sapiens
gccgacaagatggcggacggggagctgaacgtggacagcctcatcacccggctgctggaggtacgaggatgtcgtccaggaaagattgtgcagatgactgaag

SEQ ID NO: 371 - DNA, 4916 bp, Homo sapiens
gcggagctgggcggtgccgaggaggaggaggtggcggcctgggtctgacgcggccctgttcgagggggcctctcttgtttatttatttattttccgtgggtgcctccgagtgtgcgcgcgctctcgctacccggcggggagggggtggggggagggcccgggaaaagggggagttggagccggggtcgaaacgccgcgtgacttgtaggtgagagaacgccgagccgtcgccgcagcctccgccgccgagaagcccttgttcccgctgctgggaaggagagtctgtgccgacaagatggcggacggggagctgaacgtggacagcctcatcacccggctgctggaggtacgaggatgtcgtccaggaaagattgtgcagatgactgaagcagaagttcgaggcttatgtatcaagtctcgggagatctttctcagccagcctattcttttggaattggaagcaccgctgaaaatttgtggagatattcatggacaatatacagatttactgagattatttgaatatggaggtttcccaccagaagccaactatcttttcttaggagattatgtggacagaggaaagcagtctttggaaaccatttgtttgctattggcttataaaatcaaatatccagagaacttctttctcttaagaggaaaccatgagtgtgctagcatcaatcgcatttatggattctatgatgaatgcaaacgaagatttaatattaaattgtggaagaccttcactgattgttttaactgtctgcctatagcagccattgtggatgagaagatcttctgttgtcatggaggattgtcaccagacctgcaatctatggagcagattcggagaattatgagacctactgatgtccctgatacaggtttgctctgtgatttgctatggtctgatccagataaggatgtgcaaggctggggagaaaatgatcgtggtgtttcctttacttttggagctgatgtagtcagtaaatttctgaatcgtcatgatttagatttgatttgtcgagctcatcaggtggtggaagatggatatgaattttttgctaaacgacagttggtaaccttattttcagccccaaattactgtggcgagtttgataatgctggtggaatgatgagtgtggatgaaactttgatgtgttcatttcagatattgaaaccatctgaaaagaaagctaaataccagtatggtggactgaattctggacgtcctgtcactccacctcgaacagctaatccgccgaagaaaaggtgaagaaaggaattctgtaaagaaaccatcagatttgttaaggacatacttcataatatataagtgtgcactgtaaaaccatccagccatttgacaccctttatgatgtcacacctttaacttaaggagacgggtaaaggatcttaaatttttttctaatagaaagatgtgctacactgtattgtaataagtatactctgttatagtcaacaaagttaaatccaaattcaaaattatccattaaagttacatcttcatgtatcacaatttttaaagttgaaaagcatcccagttaaactagatgtgatagttaaaccagatgaaagcatgatgatccatctgtgtaatgtggttttagtgttgcttggttgtttaattattttgagcttgttttgtttttgtttgttttcactagaataatggcaaatacttctaatttttttccctaaacatttttaaaagtgaaatatgggaagagctttacagacattcaccaactattattttcccttgtttatctacttagatatctgtttaatcttactaagaaaactttcgcctcattacattaaaaaggaattttagagattgattgttttaaaaaaaaatacgcacattgtccaatccagtgattttaatcatacagtttgactgggcaaactttacagctgatagtgaatattttgctttatacaggaattgacactgatttggatttgtgcactctaatttttaacttattgatgctctattgtgcagtagcatttcatttaagataaggctcatatagtattacccaactagttggtaatgtgattatgtggtaccttggctttaggttttcattcgcacggaacaccttttggcatgcttaacttcctggtaacaccttcacctgcattggttttctttttcttttttctttctttttttttttttttttttttttgagttgttgtttgtttttagatccacagtacatgagaatccttttttgacaagccttggaaagctgacactgtctctttttcctccctctatacgaaggatgtatttaaatgaatgctggtcagtgggacattttgtcaactatgggtattgggtgcttaactgtctaatattgccatgtgaatgttgtatacgattgtaaggcttatgtcactaaagatttttattctgattttttcataatcaaaggtcatatgatactgtatagacaagctttgtagtgaagtatagtagcaataatttctgtacctgatcaagtttattgcagcctttcttttcctatttcttttttttaagggttagtattaacaaatggcaatgagtagaaaagttaacatgaagattttagaaggagagaacttacaggacacagatttgtgattctttgactgtgacactattggatgtgattctaaaagcttttattgagcattgtcaaatttgtaagcttcatagggatggacatcatatctataatgcccttctatatgtgctaccatagatgtgacatttttgaccttaatatcgtctttgaaaatgttaaattgagaaacctgttaacttacattttatgaattggcacattgtattacttactgcaagagatatttcattttcagcacagtgcaaaagttctttaaaatgcatatgtctttttttctaattccgttttgttttaaagcacattttaaatgtagttttctcatttagtaaaagttgtctaattgatatgaagcctgactgattttttttttccttacagtgagacatttaagcacacattttattcacatagatactatgtccttgacatattgaaatgattcttttctgaaagtattcatgatctgcatatgatgtattaggttaggtcacaaaggttttatctgaggtgatttaaataacttcctgattggagtgtgtaagctgagcgatttctaataaaattttagttgtacacttttagtagtcatagtgaagcaggtctagaaaataagcctttggcagggaaaaagggcaatgttgattaatctcagtattaaaccacattaatctgtatcccattgtctggcttttgtaaattcatccaggtcaagactaagtatgttggttaataggaatccttttttttttttttaaagactaaatgtgaaaaaataatcactacttaagctaattaatattggtcattaaatttaaaggatggaaatttatcatgtttaaaaattattcaagcactcttaaaaccacttaaacagcctccagtcataaaaatgtgttctttacaaatatttgcttggcaacacgacttgaaataaataaaactttgtttcttaggagaaaatgattctgtaattccagtgtcactaatttatattgttctttcctctgatttttttcaggttagtgatttttttgtatacaatttaatccaaatgttatgacattcagaaatcatgaaacacagtagatatctgttataatgtggtgtatcacatggattataaagcaaagttatggtcgatttctattcttgaaagaatcaactacagtgaatcctttgcatttgaagccttaacatgcattgctttaattttgcccagggacaaattttaataatcagcaagactggtttgtgcaaagcgttgagtcatcaggtatttagagcctagccagctacccagtatccatgctgccatatcccttcattgtaaaaagtacctaaacattcgtgaaatgattttttttagctgaaaaatgctggcaagaagaattttaaagcttaaaataggtggtaaatttgaagtatgagtgtgttcacgagaaacataggcttttcaaaaaaatttttattcaaggcaaagcaaggaacatcttgagatatgtctcaagaatataaagatgtattattttaagccaaggagctgaaatatatctcagtttataaattcaggtatattctttttgtctccatggcaaccataacttttgaaccaaaaaaaattgtttttacatctttatgctgaaaatgtgtttagattaggaatatggtcgggctgaatttgctgttgctccctaaccaaatccacctcttgttttccttgtgagtccatggctaaatcaaagctgcccctgagaagagacttaatccaagcctgattgtactagtggcatcacttagaagtaggctttccctcttcctagtagatctcaatgttttataattccttaaaacagctgaaaattgggacaacatactttacgcaatgaacagtagttaaataggaaataaactagttccatataagtatacacctagagttttaattacctttataatgtttcttaaaagtgaaacttagatacaattgtgattggatacttagatactaagtgaaacttagtgtaacaattttgatctgttaaattggattttacatgtacatttgaatgccagaatttctaaataaatcccctggttaggaaattttaaaagtcaaagcttgttttcttcaaccactaccttctacattggttgacttagaccgtaagctttttaagtttctcattgtaatttaccttctcatgcagattgctgatgttttattaaaccttatttttacaaaaatga

SEQ ID NO: 372 - protein, 327 aa, Homo sapiens
MADGELNVDSLITRLLEVRGCRPGKIVQMTEAEVRGLCIKSREIFLSQPILLELEAPLKICGDIHGQYTDLLRLFEYGGFPPEANYLFLGDYVDRGKQSLETICLLLAYKIKYPENFFLLRGNHECASINRIYGFYDECKRRFNIKLWKTFTDCFNCLPIAAIVDEKIFCCHGGLSPDLQSMEQIRRIMRPTDVPDTGLLCDLLWSDPDKDVQGWGENDRGVSFTFGADVVSKFLNRHDLDLICRAHQVVEDGYEFFAKRQLVTLFSAPNYCGEFDNAGGMMSVDETLMCSFQILKPSEKKAKYQYGGLNSGRPVTPPRTANPPKKR

SEQ ID NO: 373 - DNA, 98 bp, Homo sapiens
ccagagcgcgcgggactttctggacatgaacttccagtcgctggccatgaaacacatggatctgaagcagatggagctggacacggcggcggccaagg

SEQ ID NO: 374 - DNA, 3130 bp, Homo sapiens
agccacactgctcttcctaagccttaaagagacaggacggtcgattggtctgaaattcttgaagagacaggcgcccgctccggccggcaccatggacagcgaggcattccagagcgcgcgggactttctggacatgaacttccagtcgctggccatgaaacacatggatctgaagcagatggagctggacacggcggcggccaaggtggatgaactgaccaagcagctggagtcgctgtggtcagactctcccgcgcctcctggcccgcaggccggacccccttctaggccgccccggtacagctccagctcgatccctgagcccttcggcagccgagggtccccccggaaggcggccaccgacggcgcagacaccccgttcggacgatcagagagtgccccaaccctacacccctacagcccgctgtcccccaagggacggccgtcgtcgccgcgcaccccgctctacctgcagccggacgcctacggcagcctggaccgcgcgacctcgccccggccccgcgccttcgatggcgcaggcagctccctcggccgtgcgccctccccgcggcccgggccaggcccgctccgccagcagggtccccccacgcctttcgacttcctgggccgcgcaggctccccccgcggcagccccctggcggaggggccccaggccttcttccccgagcgtgggccgtcaccgcgcccccctgccacagcctacgacgcgccagcgtccgccttcgggagctccctgctaggctccggcggcagcgcattcgccccgcctctgcgcgcgcaagacgacctgacgctgcgccggcggcctccgaaagcctggaacgagtctgacctggacgtggcgtacgagaagaagccttcgcagacagcgagctatgaacgcctggacgtcttcgcaaggcctgcctcgccgagcctgcagctgttgccttggagggagagcagcctggatggactggggggcaccggcaaggacaacctcactagcgccaccctgccgcgcaattacaaggtctctcctctggccagcgaccggcgttcagacgcgggcagctaccggcgctcgctgggctccgcggggccgtcgggcactttgcctcgcagctggcagcccgtcagccgcatccccatgcccccctccagcccccagccccgcggggccccgcgccagcgtcccatccccctcagcatgatcttcaagctgcagaacgccttctgggagcacggggccagccgcgccatgctccctgggtcccccctcttcacccgagcacccccgcctaagctgcagccccaaccacaaccacagccccagccacaatcacaaccacagccccagctgcccccacagccccagacccaaccccaaacccctaccccagccccccagcatccccaacagacatggccccctgtgaacgaaggaccccccaaaccccccaccgagctggagcctgagccggagatagaggggctgctgacaccagtgctggaggctggcgatgtggatgaaggccctgtagcaaggcctctcagccccacgaggctgcagccagcactgccaccggaggcacagtcggtgcccgagctggaggaggtggcacgggtgttggcggaaattccccggcccctcaaacgcaggggctccatggagcaggcccctgctgtggccctgccccctacccacaagaaacagtaccagcagatcatcagccgcctcttccatcgtcatggggggccagggcccggggggccggagccagagctgtcccccatcactgagggatctgaggccagggcagggccccctgctcctgccccaccagctcccattccacccccggccccgtcccagagcagcccaccagagcagccgcagagcatggagatgcgctctgtgctgcggaaggcgggctccccgcgcaaggcccgccgcgcgcgcctcaaccctctggtgctcctcctggacgcggcgctgaccggggagctggaggtggtgcagcaggcggtgaaggagatgaacgacccgagccagcccaacgaggagggcatcactgccttgcacaacgccatctgcggcgccaactactctatcgtggatttcctcatcaccgcgggtgccaatgtcaactcccccgacagccacggctggacacccttgcactgcgcggcgtcgtgcaacgacacagtcatctgcatggcgctggtgcagcacggcgctgcaatcttcgccaccacgctcagcgacggcgccaccgccttcgagaagtgcgacccttaccgcgagggttatgctgactgcgccacctacctggcagacgtcgagcagagtatggggctgatgaacagcggggcagtgtacgctctctgggactacagcgccgagttcggggacgagctgtccttccgcgagggcgagtcggtcaccgtgctgcggagggacgggccggaggagaccgactggtggtgggccgcgctgcacggccaggagggctacgtgccgcggaactacttcgggctgttccccagggtgaagcctcaaaggagtaaagtctagcaggatagaaggaggtttctgaggctgacagaaacaagcattcctgccttccctccagacctctccctctgttttttgctgcctttatctgcacccctcaccctgctggtggtggtccttgccaccggttctctgttctcctggaagtccagggaagaaggagggccccagccttaaatttagtaatctgccttagccttgggaggtctgggaagggctggaaatcactggggacaggaaaccacttccttttgccaaatcagatcccgtccaaagtgcctcccatgcctaccaccatcatcacatcccccagcaagccagccacctgcccagccgggcctgggatgggccaccacaccactggatattcctgggagtcactgctgacaccatctctcccagcagtcttggggtctgggtgggaaacattggtctctaccaggatccctgccccacctctccccaattaagtgccttcacacagcactggtttaatgtttataaacaaaatagagaaactttccttataaataaaagtagtttgcacagaaa

SEQ ID NO: 375 - protein, 828 aa, Homo sapiens
MDSEAFQSARDFLDMNFQSLAMKHMDLKQMELDTAAAKVDELTKQLESLWSDSPAPPGPQAGPPSRPPRYSSSSIPEPFGSRGSPRKAATDGADTPFGRSESAPTLHPYSPLSPKGRPSSPRTPLYLQPDAYGSLDRATSPRPRAFDGAGSSLGRAPSPRPGPGPLRQQGPPTPFDFLGRAGSPRGSPLAEGPQAFFPERGPSPRPPATAYDAPASAFGSSLLGSGGSAFAPPLRAQDDLTLRRRPPKAWNESDLDVAYEKKPSQTASYERLDVFARPASPSLQLLPWRESSLDGLGGTGKDNLTSATLPRNYKVSPLASDRRSDAGSYRRSLGSAGPSGTLPRSWQPVSRIPMPPSSPQPRGAPRQRPIPLSMIFKLQNAFWEHGASRAMLPGSPLFTRAPPPKLQPQPQPQPQPQSQPQPQLPPQPQTQPQTPTPAPQHPQQTWPPVNEGPPKPPTELEPEPEIEGLLTPVLEAGDVDEGPVARPLSPTRLQPALPPEAQSVPELEEVARVLAEIPRPLKRRGSMEQAPAVALPPTHKKQYQQIISRLFHRHGGPGPGGPEPELSPITEGSEARAGPPAPAPPAPIPPPAPSQSSPPEQPQSMEMRSVLRKAGSPRKARRARLNPLVLLLDAALTGELEVVQQAVKEMNDPSQPNEEGITALHNAICGANYSIVDFLITAGANVNSPDSHGWTPLHCAASCNDTVICMALVQHGAAIFATTLSDGATAFEKCDPYREGYADCATYLADVEQSMGLMNSGAVYALWDYSAEFGDELSFREGESVTVLRRDGPEETDWWWAALHGQEGYVPRNYFGLFPRVKPQRSKV

SEQ ID NO: 376 - DNA, 104 bp, Homo sapiens
ttaccctgagcatgactgggacacagccgcgcccgtgccgcagaaggatttagaaatcttcaagaatttctgaggacgagctcacatctggaagaaacaggaag

SEQ ID NO: 377 - DNA, 7240 bp, Homo sapiens
gcacgcggccaccgagctggaggaggcggcgggcgtgagaccgggaatgcttggggcccccgccttcctcgcagccatccagcactcggtgcacgccccgcgaggccagcggctgctccctcccggggctattgctgctagtgccgtgagcaccgcccagccattgtctctgtgtctccgtcagccgtgccgagccgcgcacccagaggcgagggcgcgcatggggagcctccgttgatgctgccgcggctgccgcgccgccctccgaggctgcgtcccggggagtccggcttcccgagcgctccggcctggcccggcgccccggacctgagtgcctccccatggaggcgcccgggccggcccaggcggccgcggcggagagcaactcccgagaggtgacggaggatgccgccgactgggcgcccgcgctctgccccagccccgaggcgcggtcgccggaggcgcctgcctaccgcctgcaggactgcgacgcgctggtcaccatgggcactgggacgttcgggcgggtgcacctggtgaaggagaagacagccaagcatttcttcgccctcaaggtgatgagcattcccgacgtcatccgccggaagcaggagcagcacgtgcacaatgagaagtctgtcctgaaggaagtcagccacccgttcctcatcaggctgttctggacgtggcatgaggagcgcttcctctacatgctcatggagtatgtgccgggtggcgagctcttcagctacctgcgcaaccgggggcacttctccagcaccacggggctcttctactctgcggagatcatctgtgccattgagtacctgcactccaaggagatcgtctacagggatttgaagccggagaacatcctgctggatagggatggtcacatcaagctcacggactttgggtttgccaagaagctggtagacaggacttggaccctctgtggaacacccgagtacctagcccccgaagtcattcagagcaagggccacggaagggccgtggactggtgggccctcggcatcctgatattcgagatgctttcggggtttcctccattttttgatgacaacccgtttggcatttatcagaaaattcttgcaggcaaactatatttccccagacatttggatttccatgtaaaaacggggcgaatgatgtgaaacaccatcggtggttccgctccgtggactggaaagctgttccgcagagaaaactgaagcctcccatcgtgcccacgatagctggcaacggcgacacttccaacttcgaaacttaccctgagcatgactgggacacagccgcgcccgtgccgcagaaggatttagaaatcttcaagaatttctgaggacgagctcacatctggaagaaacaggaagattggaatctgcctggaacaaagaactgcacctaagcagaccagaagcaaaatgtcttcttcacggcctgaggacatttccagttttctctgtacctgtgtgtatagaaatagatcagagcacagttgaaattcatggaactggcattatttaagcaaccagaattccacactgtaggaaggttttgaaaattgtttcgttatagattttatcttatcttttggtgttgtcttggtttttctcatagactttataagtttgaactggacttatttgattataaccacaaattgtgtgtgtgtgtgtgtgtgtatatatagaagtcattatggcagatgcacaaattgtgcagtgatgtaaatatacatacttcacagagcctattatttttatttttcaattcagtttctcaaattatcttcccttctcttggggacaacatctgaagggtatgttgcatgcatttttaaaaaaatcatctcatatgcattgtatagtttgggggaataagatatccgggggccgggggtgtctacattcagtatctttagttcttcctacctagtaacttgagactttaaaagaagaaacatggagaagatgtgggagcgaatttattgcaggaatccacaatgactttgaagttgttggagcaatgcattgtattcagaaaacctgtgtcacattaaaaaatttcatctaggctaggtgcagtggcttgttcctgtagtcccagcactctgggaacctgggttgggaggattgcttaaggccaggagtttgagaccagcttgggcaacatagtgaaaccctgtctgtatggaatttacacaaattataaaaattagtcgggtgtcattgtgcatacctgtagtcccagctattcaggagctgtggtaggaggatggcttgagctcaagaggttgaggctgcagtgagccctgattgtgccagtgcactccagcctggacgacagagcaagaccctgtattaaaaaaaaaattcatcctgcacagggaaatggctacctattaaagtcccagttgaaattttttgaaaaaatacacctcccacagttcacaaataacttttaagatcagctcatctataaggctgaccttcatgcagagattttatttcacctttagttttgggaaaagcgagaaacagatgatctataggatgtgagtgggtggcagagtcaaaaggaacctcacctgttcctaatttctccttttaaatattcatgttgagtgtgcctaatactctcctcgacaagtcatgctgttttatgcagaataatccaggcgtgagagtgttctcttgggaaatgactggggagacacctgaaaggagcaacctccagatgttcttccctgggtgttgatgtcatgacagccatacagtgagtttgttctgaaacatctcttgctaaatgtgggtcatgctagacacagcataaactgagggtgtgggttctggctttgtacataactcattttctcccttgctttttctctggaccatcctggctggaaacttggctgtagacatctgaagagggtgcaccttttctctttactgtgactcacctcaaatatggcattgctcaaatctgctgtgtatgaggtcacagggcccagctgtggcaggggtgagtgcattgaagaagtaggttttggagccttccaggaattccttgttgacaacaggggtacactcacacagacctccaagactttcttctccacctcttctttttctcatgccctgccttcatctgtctccttctgcacccagagtaggggtggagtatacccttgccatgtgttagtgaaaatgtgtgcagtgagaagccagttgggtcccctcggctcctaatctcttctcaaaactcagtagctcaggttctctggagccatccggtgcattccttgctattggagctgtttttccaagcaatatctgggaagagatttctccctctagcacttgctacctctcttctgcacacatatcacacatcagtactgtggagagtttctgttaggaaaagccatacatttttaaaaatgtagcaaaatgtcaagggaaatgtaatcagatttggccagagttcgcctacagataagaaggcactgggccaggctcacacctgtaatcctaagtaacactttgggaggctggggcgagaggattgcttgagcccaggagttcaatacctgtctgggaaacacctcatctctacaaaatacaaaaaagttaactgggcatggtggagcatgcctgtagtctcagctactcaggaggctgagatgagaggatcacttgagcctgaggaggtccaggccacagtgatctgagatcacaccattgccctccagcctgggtgacagagtgagaccctgttccaaaaaaaaaaaaaaacccaaaaaacctcaatggctttttgcttttgaaggtggtatgaagagaacgtccactttaaggctttaaaagacagtgaagctggttgtagggctcacttttataatcctaggatttggggaagctgaagcagaaagattgcttgagcctgggagtttgagactggcctgggcagcatagcgagaccccatctctatataaaaaaaaagatgttaaaacagtgaaattacagaaacagaacatagccaccctgtttcatcagtgaccttttcttcacgtgacggtcaactcagtaggtgagaataattagtaggttcagcagaataaactctttacaattaataactcagtggaaaatgatgttcagatggtgaaatgtggaaatgttttagacaactctattttcagcctgtgcttctcactcaccatcctgttgggattaacagttgagggccatcgctgcctaaacatttagcgtgcggtttcccatcagttttactgtgaatgtgaaaaggtgaaactgttgctgacttcggcagcaggtatactaaaattggaatgacacagaggagattagcatggccccctgcgcgaggaagatccgcagattcatgcagcattccatatttttttaaaaaaaggttacactgtgcaccgacgtggagctagaaggaaaagcatgaagtctcatgtttgctgactataaaaataaatcatagtaataatattattgaacattctactttaaaaattattaataaaaccataaatgaaacacttgagcacactttaaaaagtacataaacccatgagtccatatgtgtaattttatgttgtctgttttattatccaggatttcatactcagatgagcattagcatcaggaaagcctgaaatgccttaattgtgaactgatacgcaggaaaatgaaatatgtaagcacattggtgaccttgttctttacagacatcatgatcagcctccagccatacagaacaaatgagaaattagaagcaattccaagaacgtgtgatggtgtgaaacccacttttgaccgtcacacacatttcagcatttgaagagacacaggctacctggaaactgcccatggcggggtcataatttaaatgtcccaatgtcatatagaggttaatttaatcaaaatgagctaaaacatggaacaatcactgaataatttaaaaagagtttacctggcagagtgtgtcatgcctgcaatcccagcactttgggaggccaaggcaggcagatcacctgaggtcaggagtttgagaccagcctggccaacatgatgaaacccttgtctctattaaaaacacaaaaattagccagatgtggtggcacatgcctgtaatcccagttagtcgggaggctgaggcaggagaatatggaactcaggaggcggaggctgcagtcaaccaagattgcgccactgcactccagccagggcgaaggagtgagactcccatctcaaaaaataaaaaaaaaaataaataaaaatagttgacccgggtgggcattccaaaatgttcccatagatgatcgtgaaacaatcactgtgcaaaatgtagaggaaaattcttacgataatcacaaaatttgtatcagaaaaacattacaaatttactttgctccatgtaattttatgaattggcagtattttcttaaattgggatacagtaagagaatatctttaggaaatggaaatgttaaaacaagaagtaacaagaggttgtttttctgaagggaaatgccaccggcctgctttcataggcattgataaagccaggaaggaaataaagtcacaaccgaatagtatacactgtatctactgaattcttctaattccttcacaacagaagtctaaatcctgcttagcctaaacatatctatagccagcgatgggcaaattatatttgctgtcagcatgatggaataagaaacagaaaccccccagcagtggggtaagattgcacgcttcatcccctcaaaatgcagttcagccccactccctctccatgcccatcaaacaactgcaaaatcacttgttactgaatttctcattcagcgttttgtttctttctgtccatacttaaagaccaaattatttgtttgctttgaagaaaaagcaaaagcaacaaaaacaccaaatcatttgaaatcactacccattaaaaaaaatcaccagtggaactaaacagttgagtggtttgggatgtgttgttcgccatttctgtgtttgacctacatggtctctagttctttggacaattgtaactgtgaaactatggcttaacactgttaaagactccaaggctccactctgtagccaggtgcaactcaggctgcacaaataccccaccagaatgtcacaatcattcattgctccagctgctgagtgaacagagtgcaagacagcactggcttgggttttatttttgcagccagttaactttgcatcaggtctacacagtccttgcagcctttgatttctccagttgtacagatttgaaatggggtgcccgggttcctctcgtttttccttcaatctacctagcatgcattttacacacattggaggagtcgtatgcactgtttttctcttgctgatggaggcaagaacgccttctaattagtataacttaaatggacgggattcacttaaaagcaagaagaaaagcacatgaacaggtgtcttaatgcatttggatactttggggtgtgtgcctgtctgtgtgtgtgtcttggtgaaggtgggctgtattttcaccaagccttttcataatcaagtttgctttgcaaaccatctggccttgcccccagcagtacagtccttcctaataacggggatgctctgtcatgtttctctgtaaattgttgtgtgttgggaagttctgttgaggcttagtttgatcttccatggtggacatgtctgttctgtatataaaaagcattacatctgtgttttagcaggtgggatttgaagcttttccacagtccttgtgctctgagatggctgttgagctctgctcagctgtcacagctgaattctttttttgtgctgaacactgggcagcctcaccttgttgccaacgtgcttctggggcccctgtgactgctgccggatgctgtgcacacaggcagagtgccttggcaggtttgtgcaccccttggcgagccagaactgggaaccccgcggagtgaccccaccttctcatggggggtcagggaggggagtgcctatttttaatcttgtttgttgcgcaatggaaatcactgtgatttgtacatatgccctaggaaaattttaccgctgtctaatttatgtaataatactgatgattctaggtttgtttaataaaactttatatcttttcagaaaaaaaaaaaaaaaaaaaaaaaaa

SEQ ID NO: 378 - skipped

SEQ ID NO: 379 - DNA, 107 bp, Homo sapiens
gttcctggaaaatgtcaataagaaggactacgtgagggtctgtgctcggaaaccctggcatcggcccccagtgccagtcagacgctctgggcaggccaagaaccccg

SEQ ID NO: 380 - DNA, 7416 bp, Homo sapiens
ccccctcccccagccgccttgtgcaaagatggctgcaccgtgagcgcagaggaggaggaggcggcggcggcggcggcgagagagcgagcacccagcgcctgcacccaccccggggccgcccgggacgccccctcccgagcgcgcgcccccccttttctctcgcaagcgccggggcaaaggcggagacagcggggtccctcctccccccttccctcctctagggggaaccccccttcccccttccttggctcagcgactgcaccccctcccttgcccgcccctccgcccctgccccctccctcccccgcccggggccttcccgggccttcggcggctgcaaagaaaaaaagagagagagaaaaggggggaaaaaaaagcagcagcggagggagcggcggcggaggagagcgcgcgcgcgccccctccctccctccctccctccccctccccccaatttccaccgcggccaattcatggacaggaactaccccagcgccggcttcggggacccgctcggcgccggggcgggatggagttacgagaggtcagcgaaagctagcttggtttatggcagctccaggacctcgcaccccgagacggacatcttacaccgccaggcctatgcggccccccacccactgcaaagctatgccaccaaccaccacccggcaggcctctctggactcttcgacactggcctccaccacgcgggctcagcagggcccgacgcctccgtcatgaaccttatctcggccctggaatcccggggcccccagcctggcccctccgcctcctctctcctctcccagttccgcagtccttcctggcaaacagccatgcacacgccaggccccacggagctcttcatctcgggtgccctgccgggttccagcacctttccgtcctcatctgccctgtcggcttaccaacacccggcttccttcggcagccgccccttcccagtgccctcgtccctcagcctccaggaccccccattcagccctccagctaacgggctcctgtcccctcatgacgtgctgcacctgaagccctcgcaggcacccacggtgccctcttcactgggcttcgagcgcctggcagggggcggtgtcttggggccagctggtctcggtccagcccagacccccccttaccgccctggccccccagacccaccaccacctcctcgccacctcccaactcagttcaacctgctggcttcctcttccgctgccgccgccgctgccgagcagtcctccccacagctctataacttctcgggtgctgccccgggcccaccgccgcctgagcgggccctgccacgccaggacacggtcatcaagcactaccagcggccagccagtgcccagcccccaccacccccgccaccagcccatgcgctccagcactatctgagctgtggaggcagctacccctccatgggccaccgggccaacctggcctgcagccccctgggtggtggggagccctccccgggtgctggggagcctagcaaggctggtcccagcggagccacggctggggcatctggccgggccacgggccctgaggcagcagggggcggtggggctgggggtggtggtggaggttaccgccccatcattcagtcgcctgggtacaagacgggcaaaggtggttatggagcagctgccgggggtgccaccaggccccccccaccccgttcgaccgccacccccaaatgtcagagcctgggtgggccagcagccgcctatgccactgggaaggcctctggggctggaggggcagggggccaggcttattcccccggtcagcctcaagggcttctgggaccccaggcctacgggcaagggtttggaggggggcaggcacaggacttgagcaaagcccccagctactcagggggccccccacagccccccagcggcccccctcctcctggcctggccacatgtcagagctactccccggaccagctgcaggggcagctgtatggggtgcagggcgagccatacccagggccagccgcccactcccaggggctgcccacagccagcccctcgctcagctacagtaccggccattccccagcgctctcgggccatgggggtggctggggacccagctccctgggaggcggcggtgaggccagcccatctcacatcattcgtccgctccagtcaccgcctgccaccggccgtccacctggagtcggctctccaggagcccctggcaaatacctgagctcagtcttggcctcagcgcctttcctggcacctccgggagctggcagctatgcagccggagcaggtggctacaagggcaagggggatggctcggagctgctggcgggcccaggtgggcctcctgcggagcgcacagaggatgaggagttccttatccagcacctcttgcaggcgcccagccctcctcggacctcaggggcggacggcttggtgggcgaggacggggcagcagatgcctctaagggacttggggggagtggcggggccgggggaccaccgggtacaccctacgagttggccaaggaagacccccagaggtaccacctgcagagtgtcatccgcaccagtgccagcctggatgagggtgccactgcggcactggagctgggcctggggaggctgaaggagaagaagaaagggccagagcggggtggcgagacccccgaggggctggccacctctgttgtccactacggggcaggcgccaaggagctgggggccttcttgcaaaagagccctccgcccccacctcccacggcccagtctacccagcccactccccatggcctccttctggaggccgggggccctgacctcccactggtgctgcctccgcctcccccccagctgctcccctcggtcctcagccatgcccccagtccctctcccagcgcctccaaagtcggcgtccacctccttgagccagccacccgcgatggggcaccccagccacctccaccgccacccccgcctccaccacccatgcccctgcagctcgaggcccacctccgcagccatggcctggagcccgcggcccccagcccccgcctgcgacccgaggagagcctggatccgccaggcgccatgcaggaattgctcggggctctggagccgctgcccccggcgcctggggatactggcgtaggcccaccaaactcggagggcaaggatcccgcaggcgcctaccgcagccccagcccgcaaggcaccaaggcgccgcgtttcgtgccgctcacctccatctgcttccctgactccttgctccaagacgaggagcgcagcttcttccccaccatggaggagatgttcggtggaggggccgcggacgactacggcaaggccgggccacctgaggacgagggggaccccaaggctggcgctgggccaccccccggcccccctgcttatgatccctatgggccctactgtcctggccgggcgtcgggagccgggcccgagacaccgggcctgggcctggaccccaacaaaccgcctgaactgccctccacggtcaacgccgagccgctgggcctgatccagagtggcccccaccaggcggcgccaccacccccgcctccgccaccgccgcctcccgcgccggcctccgaacccaagggtggcctcacctcgcccatcttctgctctaccaagccaaagaagctgctcaagacatcctccttccacctgctgcggcgccgcgacccacccttccagacccccaagaagctgtacgcccaggagtacgagttcgaggcggacgaggacaaggccgatgttcccgccgacatccgcctcaacccccggcgcttgcctgacctggtctccagctgccgctcccgtccggccctctcgccactgggggacatcgacttctgcccacccaacccaggacccgatggcccccggcgccgtggccgcaagcccacgaaggcgaaacgtgatgggccaccccggccacgggggaggccccggatccgccccctggaggtcccgaccactgcggggcccgcctcggcctccacgcccaccgatggcgccaagaaaccccggggccggggccgaggccggggtcgaaaggctgaggaggcagggggcacccggttggagcccctgaagccacttaagatcaagctgtctgtgcccaaggctggcgagggtctgggaacctcatcgggtgatgccatatcaggcactgaccacaacagcctggactcgagcctgactcgggagaagatcgaggccaagattaaggaggtggaggagaagcagccggagatgaagtcgggtttcatggcctccttcttggacttcctcaagtcaggcaagcgccacccaccactctaccaggcgggcctgacgcctccgctcagccctcccaagagtgtgccaccctctgtgccagcccgaggcctgcagccccagccccctgccacccctgctgtgccacatcccccaccttccggagcctttgggcttgggggcgccctggaggctgcagagagtgagggtctggggcttggctgcccttcaccctgcaagcggcttgatgaggagctgaagcggaacctcgagacgctgccctccttctcctcggatgaggaagactctgtcgccaagaaccgagacctgcaggagagcatctcctccgccatctctgccctcgatgacccaccccttgctgggccaaaagacacttccaccccagatgggccgcccttggcccccgcggctgcagttccagggccaccccctcttccggggctccccagtgccaacagcaatggcactcccgagcccccgctgctggaggagaaacccccacccactccacctcctgccccgactcctcagcctcagcctccgccaccccctccgccgccacagccagccctgccctcgccacccccgctggtggcccccacgcccagctcaccaccgccaccgccgctgccgccgccacctccaccagccatgccctcgcctccaccaccacccccaccagccgctgccccactggctgctcctcctgaggagcccgccgccccgtctcccgaagaccccgagctgccggacacccggcccctgcatctggccaaaaagcaggagacggcggcagtgtgtggggagacggacgaggaggccggcgagagtggcggagagggcatcttccgggaacgggacgagttcgtcatccgtgctgaggacatcccttccctcaagctggcgttgcagacggggcgtgaacccccacccatctggcgagtccagaaggcccttctgcagaaattcactccggagatcaaggacggccagaggcagttttgtgccaccagtaattatttggggtattttggggatgcaaaaaatcggtaccagcgcctctatgtaaagttcctggaaaatgtcaataagaaggactacgtgagggtctgtgctcggaaaccctggcatcggcccccagtgccagtcagacgctctgggcaggccaagaaccccgtatctgctgggggtagctctgcacctccccctaaggccccagcaccacctcccaagcctgagacccctgaaaagacgacatctgagaagcccccagagcagactcctgagacggccatgcctgagccccctgcccccgagaagccctccctcctgcggcctgttgagaaggaaaaggagaaggagaaggtgacacgtggagagcggccattgcggggtgagcgggccaccagcggacggcagacacggccagagcggagtctcgccacgggacaacctgccacatcccggctgcccaaagcccggcctaccaaggtgaaggctgaaccgccccctaagaagaggaagaaatggctgaaggaggcaggcggcaacgctacagcaggcgggggcccaccaggcagctcctcggactcggagtcctcccctggagcccccagcgaggacgagcgggcagtacctgggcgtctgctcaaaaccagggcgatgcgggagatgtaccggagctacgtggagatgttggtgagcacagcacttgacccagacatgatccaggccctggaggacacgcatgacgagctgtacctgccccccatgcggaagatagacggcctgctgaatgagcacaagaagaaagtcctgaagcggctgtcgctaagcccagccctgcaggatgctctgcacacgttcccacagctgcaagtggagcagagtggggagggctctccggaagagggggctgtgcggctgcggcctgctggggaaccctacaaccgcaagacgctcagcaagctcaagaggagcgtggtcagagcccaggagttcaaggttgagctggaaaagtcgggatactatacactctaccattcgctccaccactataaataccacaccttcctgcgctgccgggaccagaccctggccatcgagggcggcgccgaggacctgggccaggaggaggtggtccagcagtgcatgcggaaccagccgtggctggaacagctctttgactccttcagtgacctgctggcccaagcacaggcccacagccgctgcgggtgaccccgccccagcttgtgaggggggcgcctcctccatgaaccgagaattgggacagaaccgtgtcctcaggagctaacacctgggctccatcgccggggaaagggggtcatgggtcagggtgtgtctgtgctgccccctccagggcagggttcaaagtccgactccccccctctcccaagccccctccactccctccccattcctcccactgttcggtgtacagagaaattatttatatatatgtataaatgtctatttagtaacggtttccctctccccttgccccgaccccccctccacagccacagcccccgccccctccaccttgtacataatgtataggaaaagtctatgtatggctggggggggtggggtggcttcagagagctgggggaccccttccccccaagtcccccctgcaggccaagatctttgctaaaggccattccctccgcagggcatttggcgtcgggtgggaggggaaaacgcatcttgttaattatttttaatcttatttattgtacatacctggggcaggggcttggggaggtggaggggggagaagggtcccctctctctgcccctcccactccttttctacggcgatttgtctgtgtctggcccccacccactgcccatcccccattgttgtctggatgtggttctattttttatcggtctcctttcccctcctccccgttctcgcccccgccccaccccctgctcccactaccctttgtctcttgctctttcttgggcttctgtacaactcaacttgtatacactgtgtacacacaaccagccaaacgaaaacccaacggcaaacacttta

SEQ ID NO: 381 - protein, 2036 aa, Homo sapiens
MDRNYPSAGFGDPLGAGAGWSYERSAKASLVYGSSRTSHPETDILHRQAYAAPHPLQSYATNHHPAGLSGLFDTGLHHAGSAGPDASVMNLISALESRGPQPGPSASSLLSQFRSPSWQTAMHTPGPTELFISGALPGSSTFPSSSALSAYQHPASFGSRPFPVPSSLSLQDPPFSPPANGLLSPHDVLHLKPSQAPTVPSSLGFERLAGGGVLGPAGLGPAQTPPYRPGPPDPPPPPRHLPTQFNLLASSSAAAAAAEQSSPQLYNFSGAAPGPPPPERALPRQDTVIKHYQRPASAQPPPPPPPAHALQHYLSCGGSYPSMGHRANLACSPLGGGEPSPGAGEPSKAGPSGATAGASGRATGPEAAGGGGAGGGGGGYRPIIQSPGYKTGKGGYGAAAGGATRPPPPRSTATPKCQSLGGPAAAYATGKASGAGGAGGQAYSPGQPQGLLGPQAYGQGFGGGQAQDLSKAPSYSGGPPQPPSGPPPPGLATCQSYSPDQLQGQLYGVQGEPYPGPAAHSQGLPTASPSLSYSTGHSPALSGHGGGWGPSSLGGGGEASPSHIIRPLQSPPATGRPPGVGSPGAPGKYLSSVLASAPFLAPPGAGSYAAGAGGYKGKGDGSELLAGPGGPPAERTEDEEFLIQHLLQAPSPPRTSGADGLVGEDGAADASKGLGGSGGAGGPPGTPYELAKEDPQRYHLQSVIRTSASLDEGATAALELGLGRLKEKKKGPERGGETPEGLATSVVHYGAGAKELGAFLQKSPPPPPPTAQSTQPTPHGLLLEAGGPDLPLVLPPPPPQLLPSVLSHAPSPSPSASKVGVHLLEPATRDGAPQPPPPPPPPPPPMPLQLEAHLRSHGLEPAAPSPRLRPEESLDPPGAMQELLGALEPLPPAPGDTGVGPPNSEGKDPAGAYRSPSPQGTKAPRFVPLTSICFPDSLLQDEERSFFPTMEEMFGGGAADDYGKAGPPEDEGDPKAGAGPPPGPPAYDPYGPYCPGRASGAGPETPGLGLDPNKPPELPSTVNAEPLGLIQSGPHQAAPPPPPPPPPPPAPASEPKGGLTSPIFCSTKPKKLLKTSSFHLLRRRDPPFQTPKKLYAQEYEFEADEDKADVPADIRLNPRRLPDLVSSCRSRPALSPLGDIDFCPPNPGPDGPRRRGRKPTKAKRDGPPRPRGRPRIRPLEVPTTAGPASASTPTDGAKKPRGRGRGRGRKAEEAGGTRLEPLKPLKIKLSVPKAGEGLGTSSGDAISGTDHNSLDSSLTREKIEAKIKEVEEKQPEMKSGFMASFLDFLKSGKRHPPLYQAGLTPPLSPPKSVPPSVPARGLQPQPPATPAVPHPPPSGAFGLGGALEAAESEGLGLGCPSPCKRLDEELKRNLETLPSFSSDEEDSVAKNRDLQESISSAISALDDPPLAGPKDTSTPDGPPLAPAAAVPGPPPLPGLPSANSNGTPEPPLLEEKPPPTPPPAPTPQPQPPPPPPPPQPALPSPPPLVAPTPSSPPPPPLPPPPPPAMPSPPPPPPPAAAPLAAPPEEPAAPSPEDPELPDTRPLHLAKKQETAAVCGETDEEAGESGGEGIFRERDEFVIRAEDIPSLKLALQTGREPPPIWRVQKALLQKFTPEIKDGQRQFCATSNYLGYFGDAKNRYQRLYVKFLENVNKKDYVRVCARKPWHRPPVPVRRSGQAKNPVSAGGSSAPPPKAPAPPPKPETPEKTTSEKPPEQTPETAMPEPPAPEKPSLLRPVEKEKEKEKVTRGERPLRGERATSGRQTRPERSLATGQPATSRLPKARPTKVKAEPPPKKRKKWLKEAGGNATAGGGPPGSSSDSESSPGAPSEDERAVPGRLLKTRAMREMYRSYVEMLVSTALDPDMIQALEDTHDELYLPPMRKIDGLLNEHKKKVLKRLSLSPALQDALHTFPQLQVEQSGEGSPEEGAVRLRPAGEPYNRKTLSKLKRSVVRAQEFKVELEKSGYYTLYHSLHHYKYHTFLRCRDQTLAIEGGAEDLGQEEVVQQCMRNQPWLEQLFDSFSDLLAQAQAHSRCG

SEQ ID NO: 382 - DNA, 107 bp, Homo sapiens
gttcttgtcgcctccgaccgggtggccgccagcaatattgtccagatgaaggacgatcatgacaagatgtttaagatgagtgaaaagatattactcctgtgtgttgg

SEQ ID NO: 383 - DNA, 4426 bp, Homo sapiens
aatcttcgctctgaggtgctgtctcaccggtgagacctggaagcgggcgagtctcgtgctgtgtcggacctgcagcccctggccttccgccaccatggagtacctcatcggtatccaaggccccgactatgttcttgtcgcctccgaccgggtggccgccagcaatattgtccagatgaaggacgatcatgacaagatgtttaagatgagtgaaaagatattactcctgtgtgttggagaggctggagacactgtacagtttgcagaatatattcagaaaaacgtgcaactttataagatgcgaaatggatatgaattgtctcccacggcagcagctaacttcacacgccgaaacctggctgactgtcttcggagtcggaccccatatcatgtgaacctcctcctggctggctatgatgagcatgaagggccagcgctgtattacatggactacctggcagccttggccaaggccccttttgcagcccacggctatggtgccttcctgactctcagtatcctcgaccgatactacacaccgactatctcacgtgagagggcagtggaactccttaggaaatgtctggaggagctccagaaacgcttcatcctgaatctgccaaccttcagtgttcgaatcattgacaaaaatggcatccatgacctggataacatttccttccccaaacagggctcctaacatcatgtcctccctcccacttgccagggaacttttttttgatgggctcctttatttttttctactcttttcaggcgcactcttgataaatggttaattcagaataaaggtgactatggatataattgagccctctggtccaggtctcagtttacctaatattacctcagaaaggatatggagggaagatgatctttttgccaggtctgacttttcttcctgctccgccctccattaacgctcagtaccctttagcagctgacggccccacgttctactccatgcttggcttcctttccaactagctctttcatatattttacttgctagtatctccattctctctaaagtagtggttctttttgcccttaaacttaaatttttaaattaattaacctgaattaataatacatgcacttaatgtaacatgcaaacagtacaaaaacatgtagtgaaaaatatttcttccagagctgggtgtggtggctcatacctgtaatcccagcactttgggaggccgaggcgggcggatcacgaggtcaagagagcgagaccatcctgaccaacatggtaaaaccccgtctctactaaaaatacaaaaattagctgggcgtggtggcacgcacccctagtcccagctactggggaggctgagacaggagaatcggtcgaacccgggaggcagaggttgcagtgagcctagatcgcgccactgtactccagcctggcaacagagtgagactccgtctcaaaaaaagaaggaaaaatgtttcttccatccctataatccagtcatctgcttcctgcttcccttcctggaggaaacttcagctactaatttcttatgttttttaagagatattctgttactgtgtaaagtatacatacatacagacacatgccccctttaaattttttagatttatttatttatttagagacagggtctcactctagcccaggctggagtgctgtggcgtaatcttggctcactgcaacctccgcctcccgggcccaagtgatcctcccatctcagcctcctgagtagctaggattacaggcgcacaccaccaatgcccagctagtttttgtgtttttcatagagacagggtctcaccatgtcattcaggttggtcttgaactcctgggctcaagcagtctgcctgccttggcttcccagtgctgggattacaggcgtgagccaccgtgcccggctaaaaagtatttttaagttctgcatattgcttatttcacttaacactatattagagattgttttatatcaatacatatagatatgcttattcttgttgacagttgcataattttccattaaattgatgtatcatgggcagttaaccagttactcgttttactcttagcataactttagggaacaatgtggatgttttgtggttaaagctattaaaacagtggttcttgaccagatgtgtgtttcagaatgttcatctcacatttccagttgctactgatgctgctggtctaggaaccacatatcaaaaccatttggtctccgactaagataaaccctactttatccaattctgtgctcctcttaatatcatatacagataggtttttgttttgtctgtgattaaatgtatcatctaagatactacctactgatcataacgttcatattaaagtattgggttaacattagatttgggtgtcttatacactatttaatacgccaatgataaatgccttacaccataagaagaaagctaatcattgagtaaatgggagaaaagagatgattcacgtcactacagttgattcaacctccaacaccaccatgaatatgcataggtttgagcttttagctagattcctgagtgtaaggcatctattttaaaagtgccacaggttggccgggtgcggtggctcatgcctgtaatcccagcactttggccgcccgccgaggcgggcggatcacctgaggtcaggagttcaagaccagcctggccaacatggtgaaaccccatctctactaaaaaaatatataacaattagccaggcgtggtggcacacgcctgtaaacccaactacttgggaggctgaggcaggagaattgcttgagcccgggagagggaggttgcagtgagccgagatcatgccactgcactccagcctggctgacagagcaagactctgtctcaaaaaaaaaaaaaaaaaaaaaaaaaaagcgccacagatgattctgacgccctacccagtggagtgctgctactaaagcacagactatcctgctacatgattttcccatctgtacaatgactgaaatagcacctattctatgtggtagatatgagaattccatgaagtaatataggtaaacatttagttcagggcttggcatgtggtaagtgctcagtaagtgtataatgattggtaaacttgttattctgcattcaggcctcaccagggatgacatacggttctctgcctttgaatgtaagtgtccccagggcaatctcaggcaagcctgcaaacccatcctgactctcagtgtttttttgccaatctggatctctttcctgagctccaaatcaactcattcctagatagctcaccctccagatttagggacatcgaactcagtatgtctaaagctgagccttaccatctgcccctctccaaaccgcctctatgacattctgtcttagagaattagagctacctggtttcccaagtgcccaagtcagaaacccaggcatcatttatttttaataaatgttttattttggaataaatttggttttacagaaaagttgcaaagataatatggtgtccttataccccttattcagtttctgtaatgttaacatcttctatataccacagtatgtttgtcaaaactgagaaaccaacattggttggtgtattagtattactaagctccaggctttattcagattttaccagtttttccactaattttcttctgttctaggatataatccaagatacaacattgcatttagctgggcatcatttttatgccattctttatctcctgtctctacatggccaccaagttctggcatttctacatcctaaatcttttaattttattataattttttattgttgtttttcagagacagggtcttgctccatcacctaggctggagtacagtggcacgatcgtagcttactgcagtaagttcacttgaactcctgggctcaagtgaacctcttaccccagcctcccaactagctgggactagaggggtgcaccactgcacccagctaattttgtcaaaattttttgtagagacagggtctcgccatgttgcctaggctggtctcgaactcttggcctcaagtgatcctcccaccttggtctgccaaagcactgggattacagatgtgagccactgcacccagcctaatctttataaatctccatccccattactctggttcaccccctatcgtttcttagactatttaacagcctcctaacttcactctacttttaatctcttccctctccaggtctttctccatattttaaaaaactagtttcaccatccattcctctctgcccttaaaactttctggtggttttccatggcttaagagaataaagcccaattctttgatttgacatgctaggcattccataatcctctccgaacctaactccccacttcctttccctcctttacacctcataaagcctgtgttccaactaaa

SEQ ID NO: 384 - protein, 201 aa, Homo sapiens
MEYLIGIQGPDYVLVASDRVAASNIVQMKDDHDKMFKMSEKILLLCVGEAGDTVQFAEYIQKNVQLYKMRNGYELSPTAAANFTRRNLADCLRSRTPYHVNLLLAGYDEHEGPALYYMDYLAALAKAPFAAHGYGAFLTLSILDRYYTPTISRERAVELLRKCLEELQKRFILNLPTFSVRIIDKNGIHDLDNISFPKQGS

SEQ ID NO: 385 - DNA, 105 bp, Homo sapiens
gaatagaaactttggatccagcacttatcagaccaggccgcattgacaggaagattgagttccccctgcctgatgaaaagacgaagaagcgcatctttcagattc

SEQ ID NO: 386 - DNA, 4390 bp, Homo sapiens
ggtggaggaacttccggcagcggcagctcaagtggccaaggcaagatgggtcaaagtcagagtggtggtcatggtcctggaggtggcaagaaggatgacaaggacaagaaaaagaaatatgaacctcctgtaccaactagagtggggaaaaagaagaagaaaacaaagggaccagatgctgccagcaaactgccactggtgacacctcacactcagtgccggttaaaattactgaagttagagagaattaaagactatcttctcatggaggaagaattcattagaaatcaggaacaaatgaaaccattagaagaaaagcaagaggaggaaagatcaaaagtggatgatctgagggggaccccgatgtcagtaggaaccttggaagagatcattgatgacaatcatgccatcgtgtctacatctgtgggctcagaacactacgtcagcattctttcatttgtagacaaggatctgctggaacctggctgctcggtcctgctcaaccacaaggtgcatgccgtgataggggtgctgatggatgacacggatcccctggtcacagtgatgaaggtagaaaaggccccccaggagacctatgcagatattggggggttggacaaccaaattcaggaaattaaggaatctgtggagcttcctctcacccatcctgaatattatgaagagatgggtataaagcctcctaagggggtcattctctatggtccacctggcacaggtaaaaccttgttagccaaagcagtagcaaaccaaacctcagccactttcttgagagtggttggctctgaacttattcagaagtacctaggtgatgggcccaaactcgtacgggaattgttccgagttgctgaagaacatgcaccgtccatcgtgtttattgatgaaattgacgccattgggacaaaaagatatgactccaattctggtggtgagagagaaattcagcgaacaatgttggaactgctgaaccagttggatggatttgattctaggggagatgtgaaagttatcatggccacaaaccgaatagaaactttggatccagcacttatcagaccaggccgcattgacaggaagattgagttccccctgcctgatgaaaagacgaagaagcgcatctttcagattcacacaagcaggatgacgctggctgatgatgtaaccctggacgacctgatcatggctaaagatgacctctctggtgctgacatcaaggcaatctgtacagaagctggtctgatggccttaagagaacgtagaatgaaagtaacaaatgaagacttcaaaaaatctaaagaaaatgttctttataagaaacaggaaggcacccctgaggggctgtatctctaatgaaccatggctgtcatcaggaaaatggttgggagatttctcaatccctgaaagggatgaggttgggggagttgcccagaggaatccctgttcccactgatttttattagcaaaacatcctgtgtcttttggagtacgatgtgtaagtgcccattgggtggcctgttggtcactgtgcagcagtctgcttcccaataaagcgtgctctttcacaaacacttcctgtttctgcagtctccacacacacctaccgctcaacagcagcctgtgggtggacccagctacagggaagcctttggacaggaactcaggctgcggtcccaaggagtgtggacctcactatgcgttcgccacatcacacccccagagctggcgttcaacggtaattacagtgggaaatggtcactaccacagagccagggatattcgttgtttaaataataaaggctgcgttaatgtggctattgcttccaaaggaagtacagctttcctttttggaagttttgtggaccatgcatgttcttagcactctgagggcagaaaataactactggtgttcccaagagactgaggattcctagagatatcttgaaagcccttctgagcccttgggctcagaaatctcatccctttcaaggtgttcagaaacatgtcagaacttccccttccctttctccgtctatttccgtcatttctctttctgaacaaatcaggcctaaagctattaagtgggacagatcaaggtaagcgttcccttgacaggtggcctggtgtgggttgtagggcccacactgaatgaggagtgtgtattagttttctgttaatactataacaagttaccacaggctttgtttaaaaacagcacaatttggccaggcacggtggctcacgcctgtaatcccagcactttgggaagctgaggcaggcggatcacaaggtcagaagtttgaggccagcctggccaacatggtgaaaccccatctttactaaaaatacaaaaattagctgtgcgtggtggcaggtgcctgtagtcccagctactcaggaggctgaggcaggacaatcgcttgaacccaggaggcggaggttgcagtgagccaagatcccgtcactgcactccagcctgggcgacagagcaagactccgtctcaaaaataaataaataaataaataaaaaccacaattttatctcagttctgtaggtcagaagtccaacacgagtgtctccaggctaaagtcttgctgttggcaggaccgttccctctggcgtctctaagggagaatccgtttccttgctgaggattattgttggcagaatttaatttcttggagttgtgggccagctgaggtcagcatttccttgctggctgccagctgaggcctttgccagtctgtgaaggccaccctccctcctgactcgtggcacttcattttccaccagcagcagcaggcccagtccctctctcccaccgacccttctttctgcctgccttttctattcttatggatccttgtgattgcattggacccatgcagatgatccaggataatttccctgttttaaagtttacaatcttcttaatttttatctgcaaagttccttttgccatgtaacattcacacgttccagggcttagggtgtggccatctttaggggcgccactctgcctaccacagaggacatccacacgtgggggtggcccagtgcagggtaaggacggggtgcttgtggggagggcgggtgtcagcccaagtagggtgtggagctgtccatgtggaggaacaccacagcacggggactcagcatgggcagggtgaggctggcatccgtgtggggtgtatgtgcagggctggggtggtccgatagggggagtcagtgtgggcagcctgatgtgcagtatgagagcccaagtgggtgaggaaggcatctgcagggacggggtggtggcaggggagggaggctgcttatgtatggaggcagtcaggcaggtaaacaggacagtgggagccaggtttctctgaggagttagacacagaaagaagaaaacaagaacgacctctgtccactgggagcacctgggaacagtgacaccccaactgcagtgagcacccctagacccagacctttgctgctaaaagtattattctccactaaaaggagtgagggctgattccggggctaggcagggaaaggacaggatgaacccaaagtctgttttgccagaaagcaagggagtgctcaaggaatgataaggacatgtcctaaggacaccgaagcctatgtgaaggggcttccactggccaaactcgggacaatctgagcatcctaacaaacagttactattaatggaatacagtatagccctttaaatagggaactacacacacacacacacacacacacacacacacacacacacacacacacacaccccaatacatatgaattgatctgaaagtttgctgaggaaggggtatttacagattttgagagtctgccacaaaacactgttcagttagaaagggaaagtcacactggagatgcccagcagacaccgtcttcaccaagtggtcaaatgcacatcatcagtaatgggcactttgaaagtacgtgccacccaagagtgtcagtgctgtcacactcctgccaaagatgcttagcctgaatccagtgctgaggaaacaccaggcaaacacaaactgaggaacattctacaaattcagaacacttcaaaagtatccacgtcttggaagtcaaaaagcttccaatcagaaggagaccaaagagatgacaaccaagtgcagctcctgctcctgaactggatccttttcctagaggacatgactgggcctgaggacctgctaggagtactgcgtccatgctgacttcctgttcagtgtctgtatcgtgggcgggtagcagactctcagcaactgactcacacggttcaggaaacaaaattctttgtaacgcacttgcatcttttcctaagtttgagattaaaaaaaacaaaaaacccca

SEQ ID NO: 387 - protein, 440 aa, Homo sapiens
MGQSQSGGHGPGGGKKDDKDKKKKYEPPVPTRVGKKKKKTKGPDAASKLPLVTPHTQCRLKLLKLERIKDYLLMEEEFIRNQEQMKPLEEKQEEERSKVDDLRGTPMSVGTLEEIIDDNHAIVSTSVGSEHYVSILSFVDKDLLEPGCSVLLNHKVHAVIGVLMDDTDPLVTVMKVEKAPQETYADIGGLDNQIQEIKESVELPLTHPEYYEEMGIKPPKGVILYGPPGTGKTLLAKAVANQTSATFLRVVGSELIQKYLGDGPKLVRELFRVAEEHAPSIVFIDEIDAIGTKRYDSNSGGEREIQRTMLELLNQLDGFDSRGDVKVIMATNRIETLDPALIRPGRIDRKIEFPLPDEKTKKRIFQIHTSRMTLADDVTLDDLIMAKDDLSGADIKAICTEAGLMALRERRMKVTNEDFKKSKENVLYKKQEGTPEGLYL

SEQ ID NO: 388 - DNA, 107 bp, Homo sapiens
agtcttttaatgagtaccgcaaacgctttatgctgaagccctatgaatcatttgaagaacttacaggagaaaaggaaatgtctgcagagttggaagcactctatggt

SEQ ID NO: 389 - DNA, 4510 bp, Homo sapiens
aattgtcatacgacttgcagtgagcgtcaggagcacgtccaggaactcctcagcagcgcctccttcagctccacagccagacgccctcagacagcaaagcctacccccgcgccgcgccctgcccgccgctgcgatgctcgcccgcgccctgctgctgtgcgcggtcctggcgctcagccatacagcaaatccttgctgttcccacccatgtcaaaaccgaggtgtatgtatgagtgtgggatttgaccagtataagtgcgattgtacccggacaggattctatggagaaaactgctcaacaccggaatttttgacaagaataaaattatttctgaaacccactccaaacacagtgcactacatacttacccacttcaagggattttggaacgttgtgaataacattcccttccttcgaaatgcaattatgagttatgtgttgacatccagatcacatttgattgacagtccaccaacttacaatgctgactatggctacaaaagctgggaagccttctctaacctctcctattatactagagcccttcctcctgtgcctgatgattgcccgactcccttgggtgtcaaaggtaaaaagcagcttcctgattcaaatgagattgtggaaaaattgcttctaagaagaaagttcatccctgatccccagggctcaaacatgatgtttgcattctttgcccagcacttcacgcatcagtttttcaagacagatcataagcgagggccagctttcaccaacgggctgggccatggggtggacttaaatcatatttacggtgaaactctggctagacagcgtaaactgcgccttttcaaggatggaaaaatgaaatatcagataattgatggagagatgtatcctcccacagtcaaagatactcaggcagagatgatctaccctcctcaagtccctgagcatctacggtttgctgtggggcaggaggtctttggtctggtgcctggtctgatgatgtatgccacaatctggctgcgggaacacaacagagtatgcgatgtgcttaaacaggagcatcctgaatggggtgatgagcagttgttccagacaagcaggctaatactgataggagagactattaagattgtgattgaagattatgtgcaacacttgagtggctatcacttcaaactgaaatttgacccagaactacttttcaacaaacaattccagtaccaaaatcgtattgctgctgaatttaacaccctctatcactggcatccccttctgcctgacacctttcaaattcatgaccagaaatacaactatcaacagtttatctacaacaactctatattgctggaacatggaattacccagtttgttgaatcattcaccaggcaaattgctggcagggttgctggtggtaggaatgttccacccgcagtacagaaagtatcacaggcttccattgaccagagcaggcagatgaaataccagtcttttaatgagtaccgcaaacgctttatgctgaagccctatgaatcatttgaagaacttacaggagaaaaggaaatgtctgcagagttggaagcactctatggtgacatcgatgctgtggagctgtatcctgcccttctggtagaaaagcctcggccagatgccatctttggtgaaaccatggtagaagttggagcaccattctccttgaaaggacttatgggtaatgttatatgttctcctgcctactggaagccaagcacttttggtggagaagtgggttttcaaatcatcaacactgcctcaattcagtctctcatctgcaataacgtgaagggctgtccctttacttcattcagtgttccagatccagagctcattaaaacagtcaccatcaatgcaagttcttcccgctccggactagatgatatcaatcccacagtactactaaaagaacgttcgactgaactgtagaagtctaatgatcatatttatttatttatatgaaccatgtctattaatttaattatttaataatatttatattaaactccttatgttacttaacatcttctgtaacagaagtcagtactcctgttgcggagaaaggagtcatacttgtgaagacttttatgtcactactctaaagattttgctgttgctgttaagtttggaaaacagtttttattctgttttataaaccagagagaaatgagttttgacgtctttttacttgaatttcaacttatattataagaacgaaagtaaagatgtttgaatacttaaacactgtcacaagatggcaaaatgctgaaagtttttacactgtcgatgtttccaatgcatcttccatgatgcattagaagtaactaatgtttgaaattttaaagtacttttggttatttttctgtcatcaaacaaaaacaggtatcagtgcattattaaatgaatatttaaattagacattaccagtaatttcatgtctactttttaaaatcagcaatgaaacaataatttgaaatttctaaattcatagggtagaatcacctgtaaaagcttgtttgatttcttaaagttattaaacttgtacatataccaaaaagaagctgtcttggatttaaatctgtaaaatcagtagaaattttactacaattgcttgttaaaatattttataagtgatgttcctttttcaccaagagtataaacctttttagtgtgactgttaaaacttccttttaaatcaaaatgccaaatttattaaggtggtggagccactgcagtgttatcttaaaataagaatattttgttgagatattccagaatttgtttatatggctggtaacatgtaaaatctatatcagcaaaagggtctacctttaaaataagcaataacaaagaagaaaaccaaattattgttcaaatttaggtttaaacttttgaagcaaacttttttttatccttgtgcactgcaggcctggtactcagattttgctatgaggttaatgaagtaccaagctgtgcttgaataatgatatgttttctcagattttctgttgtacagtttaatttagcagtccatatcacattgcaaaagtagcaatgacctcataaaatacctcttcaaaatgcttaaattcatttcacacattaattttatctcagtcttgaagccaattcagtaggtgcattggaatcaagcctggctacctgcatgctgttccttttcttttcttcttttagccattttgctaagagacacagtcttctcatcacttcgtttctcctattttgttttactagttttaagatcagagttcactttctttggactctgcctatattttcttacctgaacttttgcaagttttcaggtaaacctcagctcaggactgctatttagctcctcttaagaagattaaaagagaaaaaaaaaggcccttttaaaaatagtatacacttattttaagtgaaaagcagagaattttatttatagctaattttagctatctgtaaccaagatggatgcaaagaggctagtgcctcagagagaactgtacggggtttgtgactggaaaaagttacgttcccattctaattaatgccctttcttatttaaaaacaaaaccaaatgatatctaagtagttctcagcaataataataatgacgataatacttcttttccacatctcattgtcactgacatttaatggtactgtatattacttaatttattgaagattattatttatgtcttattaggacactatggttataaactgtgtttaagcctacaatcattgatttttttttgttatgtcacaatcagtatattttctttggggttacctctctgaatattatgtaaacaatccaaagaaatgattgtattaagatttgtgaataaatttttagaaatctgattggcatattgagatatttaaggttgaatgtttgtccttaggataggcctatgtgctagcccacaaagaatattgtctcattagcctgaatgtgccataagactgaccttttaaaatgttttgagggatctgtggatgcttcgttaatttgttcagccacaatttattgagaaaatattctgtgtcaagcactgtgggttttaatatttttaaatcaaacgctgattacagataatagtatttatataaataattgaaaaaaattttcttttgggaagagggagaaaatgaaataaatatcattaaagataactcaggagaatcttctttacaattttacgtttagaatgtttaaggttaagaaagaaatagtcaatatgcttgtataaaacactgttcactgttttttttaaaaaaaaaacttgatttgttattaacattgatctgctgacaaaacctgggaatttgggttgtgtatgcgaatgtttcagtgcctcagacaaatgtgtatttaacttatgtaaaagataagtctggaaataaatgtctgtttatttttgtactatttaaaaattgacagatcttttctgaagataaactttgattgtttctata

SEQ ID NO: 390 - protein, 604 aa, Homo sapiens
MLARALLLCAVLALSHTANPCCSHPCQNRGVCMSVGFDQYKCDCTRTGFYGENCSTPEFLTRIKLFLKPTPNTVHYILTHFKGFWNVVNNIPFLRNAIMSYVLTSRSHLIDSPPTYNADYGYKSWEAFSNLSYYTRALPPVPDDCPTPLGVKGKKQLPDSNEIVEKLLLRRKFIPDPQGSNMMFAFFAQHFTHQFFKTDHKRGPAFTNGLGHGVDLNHIYGETLARQRKLRLFKDGKMKYQIIDGEMYPPTVKDTQAEMIYPPQVPEHLRFAVGQEVFGLVPGLMMYATIWLREHNRVCDVLKQEHPEWGDEQLFQTSRLILIGETIKIVIEDYVQHLSGYHFKLKFDPELLFNKQFQYQNRIAAEFNTLYHWHPLLPDTFQIHDQKYNYQQFIYNNSILLEHGITQFVESFTRQIAGRVAGGRNVPPAVQKVSQASIDQSRQMKYQSFNEYRKRFMLKPYESFEELTGEKEMSAELEALYGDIDAVELYPALLVEKPRPDAIFGETMVEVGAPFSLKGLMGNVICSPAYWKPSTFGGEVGFQIINTASIQSLICNNVKGCPFTSFSVPDPELIKTVTINASSSRSGLDDINPTVLLKERSTEL

SEQ ID NO: 391 - DNA, 110 bp, Homo sapiens
gctcgtcagcacatcatgcagcgaattcagaggcttcaggctgactgggtcttggaaatagacaccttcttgagtcagacaccctatgggtaccggtctttctcaaatat

SEQ ID NO: 392 - DNA, 1683 bp, Homo sapiens
agtcgacccaagggtggagaagagggaaggcgaaggacgcgcgttcccgggctcgtgaccgccagcggcccggggaacccgctcccagacagactcggagagatggcaggcggaagacaccggcgcgtcgtgggcaccctccacctgctgctgctggtggccgccctgccctgggcatccaggggggtcagtccgagtgcctcagcctggccagaggagaagaattaccaccagccagccattttgaattcatcggctcttcggcaaattgcagaaggcaccagtatctctgaaatgtggcaaaatgacttacagccattgctgatagagcgatacccgggatcccctggaagctatgctgctcgtcagcacatcatgcagcgaattcagaggcttcaggctgactgggtcttggaaatagacaccttcttgagtcagacaccctatgggtaccggtctttctcaaatatcatcagcaccctcaatcccactgctaaacgacatttggtcctcgcctgccactatgactccaagtatttttcccactggaacaacagagtgtttgtaggagccactgattcagccgtgccatgtgcaatgatgttggaacttgctcgtgccttagacaagaaactcctttccttaaagactgtttcagactccaagccagatttgtcactccagctgatcttctttgatggtgaagaggcttttcttcactggtctcctcaagattctctctatgggtctcgacacttagctgcaaagatggcatcgaccccgcacccacctggagcgagaggcaccagccaactgcatggcatggatttattggtcttattggatttgattggagctccaaacccaacgtttcccaatttttttccaaactcagccaggtggttcgaaagacttcaagcaattgaacatgaacttcatgaattgggtttgctcaaggatcactctttggaggggcggtatttccagaattacagttatggaggtgtgattcaggatgaccatattccatttttaagaagaggtgttccagttctgcatctgataccgtctcctttccctgaagtctggcacaccatggatgacaatgaagaaaatttggatgaatcaaccattgacaatctaaacaaaatcctacaagtctttgtgttggaatatcttcatttgtaatactctgatttagtttaggataattggttctagaattgaattcaaaagtcaaggcatcatttaaaataatctgatttcagacaaatgctgtgtggaaacatctatcctatagatcatcctattcttatgtgtctttggttatcagatcaattacagaataattgtgttgtgatattgtgtcctaaattgctcattaatttttatttacagattgaaaaagagggaccgtgtaaagaaaatggaaaataaatatctttcaaagactcttttagataaacacgatgaggcaaaatcaggttcattcattcaacgatagtttctcaacagtacttaaatagcggttggaaaacgtagccttcattttatgattttttcatatgtggaaatctattacatgtaatacaaaacaaacatgtagtttgaaggcggtcagatttctttgagaaatctttgtagagttaattttatggaaattaaaatcagaattaaatgcta

SEQ ID NO: 393 - protein, 361 aa, Homo sapiens
MAGGRHRRVVGTLHLLLLVAALPWASRGVSPSASAWPEEKNYHQPAILNSSALRQIAEGTSISEMWQNDLQPLLIERYPGSPGSYAARQHIMQRIQRLQADWVLEIDTFLSQTPYGYRSFSNIISTLNPTAKRHLVLACHYDSKYFSHWNNRVFVGATDSAVPCAMMLELARALDKKLLSLKTVSDSKPDLSLQLIFFDGEEAFLHWSPQDSLYGSRHLAAKMASTPHPPGARGTSQLHGMDLLVLLDLIGAPNPTFPNFFPNSARWFERLQAIEHELHELGLLKDHSLEGRYFQNYSYGGVIQDDHIPFLRRGVPVLHLIPSPFPEVWHTMDDNEENLDESTIDNLNKILQVFVLEYLHL

SEQ ID NO: 394 - DNA, 102 bp, Homo sapiens
gaaggttatcatcctgggagattctggagtcgggaagacatcactcatgaaccagtatgtgaataagaaattcagcaatcagtacaaagccacaataggagc

SEQ ID NO: 395 - DNA, 2240 bp, Homo sapiens
acttccgctcggggcggcggcggtggcggaagtgggagcgggcctggagtcttggccataaagcctgaggcggcggcagcggcggagttggcggcttggagagctcgggagagttccctggaaccagaacttggaccttctcgcttctgtcctccgtttagtctcctcctcggcgggagccctcgcgacgcgcccggcccggagcccccagcgcagcggccgcgtttgaaggatgacctctaggaagaaagtgttgctgaaggttatcatcctgggagattctggagtcgggaagacatcactcatgaaccagtatgtgaataagaaattcagcaatcagtacaaagccacaataggagctgactttctgaccaaggaggtgatggtggatgacaggctagtcacaatgcagatatgggacacagcaggacaggaacggttccagtctctcggtgtggccttctacagaggtgcagactgctgcgttctggtatttgatgtgactgcccccaacacattcaaaaccctagatagctggagagatgagtttctcatccaggccagtccccgagatcctgaaaacttcccatttgttgtgttgggaaacaagattgacctcgaaaacagacaagtggccacaaagcgggcacaggcctggtgctacagcaaaaacaacattccctactttgagaccagtgccaaggaggccatcaacgtggagcaggcgttccagacgattgcacggaatgcacttaagcaggaaacggaggtggagctgtacaacgaatttcctgaacctatcaaactggacaagaatgaccgggccaaggcctcggcagaaagctgcagttgctgagggggcagtgagagttgagcacagagtccttcacaaaccaagaacacacgtaggccttcaacacaattcccctctcctcttccaaacaaaacatacattgatctctcacatccagctgccaaaagaaaaccccatcaaacacagttacaccccacatatctctcacacacacacacacacgcacacacacacacacagatctgacgtaatcaaactccagcccttgcccgtgatggctccttggggtctgcctgcccacccacatgagcccgcgagtatggcagcaggacaagccagcggtggaagtcattctgatatggagttggcattggaagcttattctttttgttcactggagagagagagaactgtttacagttaatctgtgtctaattatctgattttttttattggtcttgtggtctttttaccccccctttcccctccctccttgaaggctaccccttgggaaggctggtgccccatgccccattacaggctcacacccagtctgatcaggctgagttttgtatgtatctatctgttaatgcttgttacttttaactaatcagatctttttacagtatccatttattatgtaatgcttcttagaaaagaatcttatagtacatgttaatatatgcaaccaattaaaatgtataaattagtgtaagaaattcttggattatgtgtttaagtcctgtaatgcaggcctgtaaggtggagggttgaaccctgtttggattgcagagtgttactcagaattgggaaatccagctagcggcagtattctgtacagtagacacaagaattatgtacgccttttatcaaagacttaagagccaaaaagcttttcatctctccagggggaaaactgtctagttcccttctgtgtctaaattttccaaaacgttgatttgcataatacagtggtatgtgcaatggataaattgccgttatttcaaaaattaaaattctcattttctttcttttttttcccccctgctccacacttcaaaactcccgttagatcagcattctactacaagagtgaaaggaaaaccctaacagatctgtcctagtgattttacctttgttctagaaggcgctcctttcagggttgtggtattcttaggttagcggagctttttcctcttttccccacccatctccccaatattgcccattattaattaacctctttctttggttggaaccctggcagttctgctcccttcctaggatctgcccctgcattgtagcttgcttaacggagcacttctcctttttccaaaggtctacattctagggtgtgggctgagttcttctgtaaagagatgaacgcaatgccaataaaattgaacaagaacaatgataaaaaaaa

SEQ ID NO: 396 - protein, 207 aa, Homo sapiens
MTSRKKVLLKVIILGDSGVGKTSLMNQYVNKKFSNQYKATIGADFLTKEVMVDDRLVTMQIWDTAGQERFQSLGVAFYRGADCCVLVFDVTAPNTFKTLDSWRDEFLIQASPRDPENFPFVVLGNKIDLENRQVATKRAQAWCYSKNNIPYFETSAKEAINVEQAFQTIARNALKQETEVELYNEFPEPIKLDKNDRAKASAESCSC

SEQ ID NO: 397 - DNA, 105 bp, Homo sapiens
tgctgaattcttctctgatatcttcctgtcatggttccccttctactacatgctgaagtgtggcttcctgttgtggtgcatggccccgagcccttctaatggggc

SEQ ID NO: 398 - DNA, 3008 bp, Homo sapiens
actaggaacagccccgagcggcgagacggtccccgccatgtctgcggccatgagggagaggttcgaccggttcctgcacgagaagaactgcatgactgaccttctggccaagctcgaggccaaaaccggcgtgaacaggagcttcatcgctcttggtgtcatcggactggtggccttgtacctggtgttcggttatggagcctctctcctctgcaacctgataggatttggctacccagcctacatctcaattaaagctatagagagtcccaacaaagaagatgatacccagtggctgacctactgggtagtgtatggtgtgttcagcattgctgaattcttctctgatatcttcctgtcatggttccccttctactacatgctgaagtgtggcttcctgttgtggtgcatggccccgagcccttctaatggggctgaactgctctacaagcgcatcatccgtcctttcttcctgaagcacgagtcccagatggacagtgtggtcaaggaccttaaagacaaggccaaagagactgcagatgccatcactaaagaagcgaagaaagctaccgtgaatttactgggtgaagaaaagaagagcacctaaaccagactggatggaaacttcctgccctctctgtaccttcctactggagcttgatgttatattagggactgtggtataattattttaataatgttgccttggaaacatttttgagatattaaagattggaatgtgttgtaagtttctttgcttacttttactgtctatatatatagggagcactttaaacttaatgcagtgggcagtgtccacgtttttggaaaatgtattttgcctctgggtaggaaaagatgtatgttgctatcctgcaggaaatataaacttaaaataaaattatataccccacaggctgtgtactttactgggctctccctgcacgcattttctctgtagttacatttaggataatctttatggttctacttcctgtaatgtacaattttatataattctgaaatgtttttaatgtatttgtgcacatgtacatatggaaatgttactgtctgactacaacatgcatcatgctcatggggagggagcaggggaaggttgtatgtgtcatttataacttctgtacagtaagaccacctgccaaaagctggaggaaccattgtgctggtgtggtctactaaataatactttaggaaatacgtgattaatatgcaagtgaacaaagtgagaaatgaaatcgaatggagattggcctggttgtttccgtagtatatggcatatgaataccaggatagctttataaagcagttagttagttagttactcactctagtgataaatcgggaaatttacacacacacacacacacacacacacacacacacacacacagagtaacctgtaactctcaattccctgaaaaactagtaatactgtcttatctgctataaactttacatatttgtctattgtcaagatgctacaatggaaaccatttctggttttatcttcaaagcggagaaacatgttgatttagtcttctttcccaatcttcttttttaaaccagtttaaggaacttctgaagatttgtccacctctgattacatgtatgttcttgtttgtatcattagcaacaacatgctaatgacgacacctagctctaagagcaattctgggagaatgaaaggaagtataaagtaacccataatctgcttggcaatagttaagtcaatctatcttcagtttttctctggcctttaaggtcaaacacaagaggcttccctagtttacaagtcagagtcacttgtagtccatttaaatgccctcatccgtattctttgtgttgataagctgcacatgactacatagtaagtacagaacagtaaagttaaaacggatgtctccattgatctgccaaatcgttatagagagcaatttgtctggactagaaaatctgagttttacaccatactgttaagagtccttttgaattaaactcgactaaaacaagtgtataactaaactaacaagattaaatatccagccagtacagtattttttaaggcaaataaagatgattagctcaccttgagataacaatcaggtaagatcataacaatgtctcatgatgtaaaaaatattaaagatatcaatactaagtgacagtatcactctaatataatatggatcagagcatttattttggggaggaaaacagtggtgattaccggcattttattaaacttaaaactttgtagaaagcaaacaaaattgttcttgggagaaaatcaacttttagattaaaaaaattttaagtatctaggagtatttaaatccttttcccataaataaaagtacagttttcttggtggcagaatgaaaatcagcaacttctagcatatagactatataatcagattgacagcatatagaatatattatcagacaagatgaggaggtacaaaagttactattgctcataatgacttacaggctaaaattagttttaaaatactatattaaattctgaatgcaatttttttttgttcccttgagaccaaaatttaagttaactgttgctggcagtctaagtgtaaatgttaacagcaggagaagttaagaattgagcagttctgttgcatgatttcccaaatgaaatactgccttggctagagtttgaaaaactaattgagcctgtgcctggctagaaaacaagcgtttatttgaatgtgaatagtgtttcaaaggtatgtagttacagaattcctaccaaacagcttaaattcttcaagaaagaattcctgcagcagttattcccttacctgaaggcttcaatcatttggatcaacaactgctactctcgggaagactcctctactcacagctgaagaaaatgagcacacccttcacactgttatcacctatcctgaagatgtgatacactgaatggaaataaatagatgtaaataaaattgagttctcatttaa

SEQ ID NO: 399 - protein, 189 aa, Homo sapiens
MSAAMRERFDRFLHEKNCMTDLLAKLEAKTGVNRSFIALGVIGLVALYLVFGYGASLLCNLIGFGYPAYISIKAIESPNKEDDTQWLTYWVVYGVFSIAEFFSDIFLSWFPFYYMLKCGFLLWCMAPSPSNGAELLYKRIIRPFFLKHESQMDSVVKDLKDKAKETADAITKEAKKATVNLLGEEKKST

SEQ ID NO: 400 - DNA, 110 bp, Homo sapiens
gtctcagtccgaccgggctagctttggcgaggggacggagccggatcaggagccgccgccgccatatcaggaacaagttccagttccagtctaccacccaacacctagcc

SEQ ID NO: 401 - DNA, 3074 bp, Homo sapiens
agtgcccgagccggcctcgttctggctgccgccgtctcgctgaggcggagtaggatgaggcccgcggccgtggctccggcgtcggcgggggcagcagcagctgaggcagcagctgaggcagccgcgacggccgcgcccccccccgctgacctggattaggcccagcagctccgtggccgccgccgccccgcgggggggcggggtggggaagtgcttcgtctccccgcccccccccccccatcgctgcctcgcaggaggcgaacgccgcgaccccagcggagcccgcggcccagccttgatcccccaaccccgggggctggcatgagcggcccctcggcggcaccgtggggcggtggagtcgcctccgcctgatccccggcctgtcgcccgaccccacctcgccaaccgaggcggaccgcggagtgtgcgaacgaccccaccgctgctttctcctcccccagatcacgcaccccagctccggaagatggggaactgcctcaaatcccccacctcggatgacatctccctgcttcacgagtctcagtccgaccgggctagctttggcgaggggacggagccggatcaggagccgccgccgccatatcaggaacaagttccagttccagtctaccacccaacacctagccagactcggctagcaactcagctgactgaagaggaacaaattaggatagctcaaagaataggtcttatacaacatctgcctaaaggagtttatgaccctggaagagatggatcagaaaaaaagatccgggagtgtgtgatctgtatgatggactttgtttatggggacccaattcgatttctgccgtgcatgcacatctatcacctggactgtatagatgactggttgatgagatccttcacgtgcccctcctgcatggagccagttgatgcagcactgctttcatcctatgagactaattgagccagggtctcttatctgacttcaagtgaaccaccattttggtggttttgatcttttgtcactgagcccaaagagccagggattaggaattaagatcgtgcacaaaagtttccttaaaattcctggatggctgcagatgttgggggaaaaagtacgtgatattttagaaacttagtgggaaaagtaggatggtatttttatgtaaagccttgacccaatgtttaaaaatataattgtatttagatcttgttattgctccagtacataggaattgtgtaaagtgttaacagcagctgtatttgtttaaattgtgtgtattgaagattaggaaaaagatagtagttatttttcctaaatgaaataactttcttctcttccccttccccacccgaattcttttctgaagttgctggcatttgggtcaaggttttattaaaagctacattttataacactggcacacacaaaaaagtagttttaagcttgtttgcacagttctttttttccattggaaatggaattcattgccttaggtctttttaaatagtgtattattatcgttggggctggctctatgcttgaaaaccagtttatttataacctgttataagtgctatattctgtttgcagttaggaaatgcagaattcaaagtgatctcctagcttgtaagcaaactgagatgcactatcccttttctataaaaaataagttaatgtgtcaagaaaccaactctattaaggtggggtttaatattaccctttcctatgtgttttatctaattattttggttgttaatatggtgataatggaaagtcaagttaaattttaaatattaagaattctgatttattgagattgaattatgccaccacgtttatgtaaaaatgaaggtggcaccgtggtgagacctaatgagaaatagttactcagttgtaaaaattttgatttattctctttcttctgacctccttgcctcttgtcttgaaccatagcaaaaggatactgcatctctcattactgtagtgctgaggttattgaagttatacaaaacacatctcagtctctgtttcttggaaaggtatctattacatcctgctagctgactgacaaaactaagcagggagaataaagataattgtattttatgttttgcacacaaacgcagaatttgtataaccatatgacttcatagttgtgatctcaaaaaagaaggaatttctcctttgtttcttgcagttaatgtaagaatactttaaatctctaagcttctgaagtgttagaggtagagatggtctagtaaagatgtagtagtaatgttttatccatttagcatgtgtttattttttcatatgtactcaaaggtgacttattggttcacctcagtgatattacagctaaaaaaatcattcattagcaaaaggaaaagtggtctcaacctaacatcagaagtgtttcttattattattttatattgagttgaatattgaactctaacagttttctacatacaaaacacagtgtcatgaaggttattcataattgcattatagaggaatgtagtatgtcataagtactttgtaaagatttgacattcaactgtagtatccatatgttgcttaaatttccttatgagccccatgatggaaagacttaaagatgaatttgagaaaaattgaaagaaattagattatcaggttctgttaaattgttacatgtatcttgcttaaatttctgtttattaatttatatccacccaagtacataaagcaaatttggaggaaacaactgaagttgtgcaatattttctgataattgctttttttattcttgtgttttctacttaaacataatgtctgtgtcatcaagtattatagtcagacttttctttttttctagattgttaaaattggcaaatgaacttttttaaaaatcatcttccatgttgcagttagtctttcttttcattacaagtctttcacagaagtttggtggtaatattgaaagaactagcattgggcagaatgtgtcttttttaggcactttatattctcaacatacaatgttaagaaccatcaattttgacttttactaagttgttaaataaagttataatacagctgtgaa

SEQ ID NO: 402 - protein, 154 aa, Homo sapiens
MGNCLKSPTSDDISLLHESQSDRASFGEGTEPDQEPPPPYQEQVPVPVYHPTPSQTRLATQLTEEEQIRIAQRIGLIQHLPKGVYDPGRDGSEKKIRECVICMMDFVYGDPIRFLPCMHIYHLDCIDDWLMRSFTCPSCMEPVDAALLSSYETN

SEQ ID NO: 403 - DNA, 103 bp, Homo sapiens
tgtggaacactgcaaattattccatagcacggataccaaatctgtggtttgtccgatatgtgcctcgatgccctggggagaccccaactaccgcagcgccaac

SEQ ID NO: 404 - DNA, 2447 bp, Homo sapiens
gcagagcggcagcaagatggcggcgcaacagcgggactgcgggggtgctgcgcagctggcggggccggcggcggaggctgaccccctaggacgcttcacgtgtcccgtgtgcttagaggtgtacgagaagccggtacaggtgccctgcggacacgtcttttgctctgcatgcctgcaggaatgtctgaagccgaagaagcctgtctgtggggtgtgtcgcagcgctctggcacctggcgtccgagccgtggagctcgagcggcagatcgagagcacagagacttcttgccatggctgccgtaagaatttcttcctgtccaagatccggtcccacgtggctacttgttccaaataccagaattacatcatggaaggtgtgaaggccaccattaaggatgcatctcttcagccaaggaatgttccaaaccgttacacctttccttgtccttactgtcctgagaagaactttgatcaggaaggacttgtggaacactgcaaattattccatagcacggataccaaatctgtggtttgtccgatatgtgcctcgatgccctggggagaccccaactaccgcagcgccaacttcagagagcacatccagcgccggcaccggttttcttatgacacttttgtggattatgatgttgatgaagaggacatgatgaatcaggtgttgcagcgctccatcatcgaccagtgagcagagtccgtgcttgctatctgtctcatgttacagagcttccattacatattaaacgtgaaatctatgactcctgtaccttacctgttcaacagacctgaaaatgagccatggcattgggacagggtcacttctgacaggggaagtgggtccccaggtcagcccttctcttccctttgggctcttgccaaagctgtcttcccctactgttaaccttgtttgtcacacggtcgagttcgtattggttctcggctacttcctggagcttctgccgcctcctgtggaagataatctagcttctccacctcttgtttcacactcattcctcccatccagtgtttgtctctcgggtccttcaagccagccaggaccttttctgggtcatgaatagcacaatgaagcaagtgtctcctttccttgtccccaaggtgtgcagactttggcagccgtgcacctgaccagagctgaagctcccgctgggctgtggggttgccagaagctggggttgccatcccggggtacatgtcaccagtcctcttggggttttgtaccatctgatgctggaagttttgattagtgatattttctactactacatatttagagttcactggttcagtcttaaatgcctgcatggtgcctttttaggataaggtataaccatacatttttggtggaagtgtttctgggttagggaagttaaagtctgtttatccgtaagtggggaggagggtcagctaagagaagtgggagggccagagctttttggttctgatttacaaattaatgaagtagtttcaaacaacgcggtcatgtttacctctccatttgggagcctgcctacattcttgttctagaagcacaaaaaatcctcagatgaattagaagaaagaggtttggggactcagcggatactagttcttttaccttctgcttggtaacttagattaaactgagcattgtttttctgtcacaaatgttttccttatgacactggtttcgacatgtaaaatgtgtttgaaaacctgctttgtagatgcagagagaagctataggaaacccagtaccacccctggtctgttctgacgagacatcgttcataaggcacagcacatcgcaagatgaacagttgttaataaaagctgttgctggaaacttgctttaggaacagctcaagaaccttggagttcatatttcacaaatattaataaatataagtccaagagctgtcagcctaatctgtaggagcagaacctctgattgaccaaaaggcatatgggtttaggttggttttttgatgtcatatgtctctgatggggctgcaagtgctacctcgcgcttgtacactgctgctgtggggctccgcgcctgccggtgaagagctgcagatgccgagaagccagcaaacacagggcccactggaaaaaaatagttttttcattagtatttctcgggaggacccaaaagttaaggtcagcttgttcactgtaatttctggaagaagttcactcagaccttcctgaattcagatcatctcagaagtctggagggaaatctggcgaaaccttcgtttgagggactgatgtgagtgtatgtccacctcactggtggcaccgagaaacttacttccttgtattaagtgcacttcttgtatttctaataagatgactttccagaaagtgagatttgttatgttctggcttttaaaaggtaaaatataaataaatttcataacttaatctaa

SEQ ID NO: 405 - protein, 228 aa, Homo sapiens
MAAQQRDCGGAAQLAGPAAEADPLGRFTCPVCLEVYEKPVQVPCGHVFCSACLQECLKPKKPVCGVCRSALAPGVRAVELERQIESTETSCHGCRKNFFLSKIRSHVATCSKYQNYIMEGVKATIKDASLQPRNVPNRYTFPCPYCPEKNFDQEGLVEHCKLFHSTDTKSVVCPICASMPWGDPNYRSANFREHIQRRHRFSYDTFVDYDVDEEDMMNQVLQRSIIDQ

SEQ ID NO: 406 - DNA, 108 bp, Homo sapiens
ttgaactgccaccagattatccatcctcttccccaccttcattcacacttagtggcaaatggctgtcaccaactcagctatctgctctatgcaagcacttagacaacc

SEQ ID NO: 407 - DNA, 4170 bp, Homo sapiens
gagaacggaagaggcggcgcgccggttgagcagggcgtctctaggcctggtcggctggcggcgatggcaggattttcataatatatgtagtatgagttccacatcttggcctcttacccagcttcagcagtctcagctccaccagttagagaataaatgggatttgcatgaactccactctgagctgaaatacagactgcggtgttaatatccttttcttctgattgttattaacaggtccttatgtcgtcagaagatcgagaagctcaggaggatgaattgctggccctggcaagtatttacgatggagatgaatttagaaaagcagagtctgtccaaggtggagaaaccaggatctatttggatttgccacagaatttcaagatatttgtgagcggcaattcaaatgagtgtctccagaatagtggctttgaatacaccatttgctttctgcctccacttgtgctgaactttgaactgccaccagattatccatcctcttccccaccttcattcacacttagtggcaaatggctgtcaccaactcagctatctgctctatgcaagcacttagacaacctatgggaagaacaccgtggcagcgtggtcctgtttgcctggatgcaatttcttaaggaagagaccctagcatacttgaatattgtctctccttttgagctcaagattggttctcagaaaaaagtgcagagaaggacagctcaagcttctcccaacacagagctagattttggaggagctgctggatctgatgtagaccaagaggaaattgtggatgagagagcagtgcaggatgtggaatcactgtcaaatctgatccaggaaatcttggactttgatcaagctcagcagataaaatgctttaatagtaaattgttcctgtgcagtatctgtttctgtgagaagctgggtagtgaatgcatgtacttcttggagtgcaggcatgtgtactgcaaagcctgtctgaaggactactttgaaatccagatcagagatggccaggttcaatgcctcaactgcccagaaccaaagtgcccttcggtggccactcctggtcaggtcaaagagttagtggaagcagagttatttgcccgttatgaccgccttctcctccagtcctccttggacctgatggcagatgtggtgtactgcccccggccgtgctgccagctgcctgtgatgcaggaacctggctgcaccatgggtatctgctccagctgcaattttgccttctgtactttgtgcaggttgacctaccatggggtctccccatgtaaggtgactgcagagaaattaatggacttacgaaatgaatacctgcaagcggatgaggctaataaaagacttttggatcaaaggtatggtaagagagtgattcagaaggcactggaagagatggaaagtaaggagtggctagagaagaactcaaagagctgcccatgttgtggaactcccatagagaaattagacggatgtaacaagatgacatgtactggctgtatgcaatatttctgttggatttgcatgggttctctctctagagcaaacccttacaaacatttcaatgaccctggttcaccatgttttaaccggctgttttatgctgtggatgttgacgacgatatttgggaagatgaggtagaagactagttaactactgctcaagatatggaagtggattgtttttccctaatcttccgtcaagtacacaaagtaactttgcgggatatttagggtactattcattcactcttcctgcgtagaagatatggaagaacgaggtttatattttcatgtggtactactgaagaaggtgcattgatacatttttaaatgtaagttgagaaaaatttataagccaaaggttcagaaaattaaactacagaatattaaatattataatgtgcccaaagctctgaatagttaaaaattaaatatttattttcttccccaagctttaggtaaggagaagaggggtcaagagttaaacttagagaccctttgtctctgagaagcatccttctaagacattctgttggagttccctcagtactattccttacaactggagtgggtagaagccttatgaaaattatactgagaacctgatctcgtttactccatgttaatcacattcctaccaacctaaatttctgccaagtcagttctctttggaggaagcccattactccgtaactgactggatggtccagtgtcattttgatctgcttttcagaatggaaatttataatataaatatatgttttaataccacaaacactgtggggcacttgatatttattagtggtgtatatggtccactggtttcaggccaaatctagaatttagtgatactggctcagaagaatttaagttctattcagccttcctgggtgttagaacctagattcaaaatggcttgtctttgctacttttgttccacattctctctctttacctttgccctaccttctgtttgtaaggatgattttaatattaattccaggaacacatgtttttatttcctctgctggaataggagaaagcttaatatattcccaagctgaatgttcttgaattatatctgcatttaccactgtatatgcatatagtgacagtataacctgtctatactacagtagttccagtcctaactttctgaattatttttaaagatcttctctaacaagctatgggaatttggcttcatactctttctttgcaacagcagtgttctgggtgataattttgaattgatacctgttcctttttctgggttttgttggctttttgaaaaattgtctttccttatcattggtgggaggcttggtagcaaagtaacattttttggaaaagaggacagaaaaattgaactacagcttgagaacgtattctttttttcctactttgttattgcaaattgaggaatcacttttaactgttttaggtgtgtgtgtccagagtgagcaaggattatgtttttggattgtcaaagaggatgcttagtcttaaaataaaaataaatttaaaaatcatcttataattagaacagagttgctgctatttgttctgtcaccaaggcaactaatcacattttaaaactgttcggcatataacatattcttaaagtaagaaaaaaaaggtcacagaatagcatctcttttacctgggcttgtgactgagcttaggttttagggcccatattttgtttaaaccagatagtttcatggtcttccattcaggacattttgtgtaaaaattgaggttaatttgctgggcacagtggctcacgcctgtaatcccagcactttgggaggcctaggcgggcggatcacgaggtcaggagttcgagaccatcatggctaacacggtgaaaccccgtctctactaaaaatacaaaaaattagctgggcatggtggcaggcgcctgtagtcccagctactcaggaggctgaggcaggagaatggcatgaacctgggaggtggagcttgcagtgagccgagatagcgccactgcactccagcctgagcgacagagcgagactccttctcaaaaaaaaaaaaaaaaaaaattgaggttaaagaataaattaaagataagaaatggaaattaaaatgatttgttctacagtatatacctgagaagagtgatttctgtgatcaaagagttcaattcagatttattcagaaagagctactcagaagctctatagttcgtgagctacttgatattttctagagatcattttatgttaagctgttatacattgttgatgatgtcatagaagtaggaaagaagcctttataatacagttttatgaaagaaatgggagccttttttcccatttatgatattaaaaacaacacaggtatttggtgtttagtctcaaaaatttgtttggtcaccttagtgattcttaggtacaaagtcttcatcactcaattttaacaaagaaaatagggcttataaagttatacttttgaagcatgagttatgagctaattttaagatgtatagttttggtagagtacttttgtctcagtaaaatgaaagatttgggtaactccccaaatgccctgtaaaacaaatgggtttgtggaaggttgtggtgtcagcaaaatatatgatagaataaagagttttgtacctac

SEQ ID NO: 408 - protein, 474 aa, Homo sapiens
MSSEDREAQEDELLALASIYDGDEFRKAESVQGGETRIYLDLPQNFKIFVSGNSNECLQNSGFEYTICFLPPLVLNFELPPDYPSSSPPSFTLSGKWLSPTQLSALCKHLDNLWEEHRGSVVLFAWMQFLKEETLAYLNIVSPFELKIGSQKKVQRRTAQASPNTELDFGGAAGSDVDQEEIVDERAVQDVESLSNLIQEILDFDQAQQIKCFNSKLFLCSICFCEKLGSECMYFLECRHVYCKACLKDYFEIQIRDGQVQCLNCPEPKCPSVATPGQVKELVEAELFARYDRLLLQSSLDLMADVVYCPRPCCQLPVMQEPGCTMGICSSCNFAFCTLCRLTYHGVSPCKVTAEKLMDLRNEYLQADEANKRLLDQRYGKRVIQKALEEMESKEWLEKNSKSCPCCGTPIEKLDGCNKMTCTGCMQYFCWICMGSLSRANPYKHFNDPGSPCFNRLFYAVDVDDDIWEDEVED

SEQ ID NO: 409 - DNA, 100 bp, Homo sapiens
ttatcaaatttgatacaggcaatttgtgtatggtgattggtggagccaacctcggtcgtgttggtgtgatcaccaacagggaaagacatcctggttcttt

SEQ ID NO: 410 - DNA, 1189 bp, Homo sapiens
ctcttccgtcgcagagtttcgccatggcccggggccccaagaagcacttaaagcgtgttgcagcgccgaagcattggatgcttgacaaactaacgggtgtatttgcacctcgtccatcgacaggtccccacaagctgagggaatgtcttcctctgatcgtcttcctcaggaatagactcaagtatgcgttgactggagatgaggtaaagaagatatgtatgcaacgtttcatcaaaattgatggcaaggttcgagtggatgtcacataccctgctggattcatggatgtcatcagcatcgagaagacaggtgaacatttccgcctggtctatgacaccaagggccgttttgctgttcaccgcatcacagtggaagaggcaaagtacaagttgtgcaaagtgaggaagattactgtgggagtgaagggaatccctcacctggtgactcatgatgctcgaaccatccgctacccagatcctgtcatcaaggtgaacgatactgtgcagattgatttagggactggcaagataatcaactttatcaaatttgatacaggcaatttgtgtatggtgattggtggagccaacctcggtcgtgttggtgtgatcaccaacagggaaagacatcctggttcttttgatgtggtgcatgtgaaggatgccaatggcaacagctttgccacgaggctttccaacatttttgtcattggcaatggcaataaaccttggatttccctgcccaggggaaagggcattcgacttactgttgctgaagagagagataagaggctggccaccaaacagagcagtggctaaattgcagtagcagcatatctttttttctttgcacaaataaacagtgaattctcgtttcttaatgtgttttttcccccttgtggataatagtagggtttgaatttgctcatgattttggcactgtcttaagatctctaggaataccacctatacttcctctgaccctccagtaaataaacctttgcttccctcatacatgttacccacaccatctctgtgggcagagtgatggagtagcattccaaaacgaagtacaaaaaacgtatgacatttcagaaaggacggcattcttttgtggaagctatgggagatggtcttagttttcttgcttgttcacattattggtagaaattaaatcctgtggctgtaggaaa

SEQ ID NO: 411 - protein, 263 aa, Homo sapiens
MARGPKKHLKRVAAPKHWMLDKLTGVFAPRPSTGPHKLRECLPLIVFLRNRLKYALTGDEVKKICMQRFIKIDGKVRVDVTYPAGFMDVISIEKTGEHFRLVYDTKGRFAVHRITVEEAKYKLCKVRKITVGVKGIPHLVTHDARTIRYPDPVIKVNDTVQIDLGTGKIINFIKFDTGNLCMVIGGANLGRVGVITNRERHPGSFDVVHVKDANGNSFATRLSNIFVIGNGNKPWISLPRGKGIRLTVAEERDKRLATKQSSG

SEQ ID NO: 412 - DNA, 108 bp, Homo sapiens
ggccccacgctgctgaagcacccgccagctcccgcggagccctcctcggacctggcctccaagttgagggaggccgaggagacgcagagcacactgcaggccgagtgt

SEQ ID NO: 413 - DNA, 5049 bp, Homo sapiens
agaaagtgccacgactccacacgcgcgcacgcagccagcgagcggccggagcggacggcagacggggcgggcggcgtcagggtcgcagcgtctacagctgctcgggggcggtttcttggcggaggcttggccggctcctctctcccggctccgcggcggctgcgaaggcggcggctcctgccctctcgctttccctctcgcgtctctggctgcagaaagaagcttccggttctgaggtcctggaggtgccatttccctctctgttgaagcaaaggccggggcagacctcctagtgaaaggaaagcaagccaggatggatatttacgacactcaaaccttgggggttgtggtctttggaggattcatggttgtttctgccattggcatcttcctggtgtcgactttctccatgaaggaaacgtcatatgaagaagccctagccaaccagcgcaaggagatggcgaaaactcaccaccagaaagtcgagaagaaaaagaaggagaaaacagtggagaagaaaggaaagaccaagaaaaaggaagagaaacctaatgggaagatacctgatcatgatccagcccccaatgtgactgtcctccttcgagaaccagtgcgggctcctgctgtggctgtggctccaaccccagtgcagccccccattatcgttgctcctgtcgccacagttccagccatgccccaggagaagctggcctcctcccccaaggacaaaaagaagaaggagaaaaaagtggcaaaagtggaaccagctgtcagctctgtagtgaattccatccaggttctcacttcgaaggctgccatcttggaaactgctcccaaggaggtgccgatggtggtggtgcccccagtgggtgccaagggcaacacaccagccactggcactactcagggcaaaaaggcggaggggactcagaatcaaagcaaaaaggctgaaggagccccaaaccagggcagaaaggcagagggaaccccaaaccagggcaaaaagacagagggaaccccaaaccaagggaaaaaggcagagggaaccccaaaccaaggcaaaaaggcagaaggaaccccaaaccaaggcaaaaaggcggagggggcccagaaccagggtaaaaaggtagatacaaccccaaaccaggggaaaaaggtggagggggccccaacccagggcagaaaggccgagggggctcagaaccaggccaaaaaggtagaaggggcccagaaccagggcaaaaaggcagagggggcccagaatcagggcaaaaagggagagggggcccagaaccagggcaagaaggccgagggggcccagaatcagggcaagaaggccgagggggcccagaatcagggcaagaaggccgagggggcccagaatcagggcaagaaggccgagggggcccagaatcagggcaagaaggctgagggggctcagaaccagggcaaaaaggccgagggggctcagaaccagggcaaaaaagtagaaggggcccagaaccagggcaagaaggctgagggtgcccagaaccagggcaaaaaggccgagggggcccagaatcagggcaaaaaggccgagggggcccagaaccagggcaagaaggccgagggggcccagaaccagggcaagaaggccgagggggcccagaaccagggcaagaaggccgagggggcccagaaccagggcaagaaggccgagggtgctcagaaccagggcaaaaaagtagaaggggcccagaaccagggcaagaaggctgagggggcccagaaccagggcaagaaggccgagggggctcagaaccagggcaaaaaggccgagggagcccagaaccagggccaaaaaggagagggagcccagaatcagggtaaaaagacagaaggggctcagggcaaaaaggcagaaaggagtcccaaccaaggcaaaaaaggagagggagctcccatccagggcaaaaaggcagattcggttgctaatcagggcacaaaggtagagggtattacaaaccaggggaaaaaagcagaagggtcccccagtgaaggcaaaaaggcagaagggtcccccaaccaaggcaaaaaggcagacgcagctgccaatcagggtaaaaagacagagtcagcttctgtccagggcagaaatacagatgtggcccagagcccagaggcaccaaagcaagaggctcctgccaagaagaagtctggttcaaagaaaaaaggtgagcctgggcccccagatgccgacggccctctctacctcccctacaagacgctggtctccacggttgggagcatggtgttcaacgagggcgaggcccagcggctcatcgagatcctgtctgagaaggctggcatcattcaggacacctggcacaaggccactcagaagggtgaccctgtggcgattctgaaacgccagctggaagagaaggaaaaactgctggccacagaacaggaagatgcggctgtcgccaagagcaaactgagggagctcaacaaggagatggcagcagaaaaggccaaagcagcagccggggaggccaaagtgaaaaagcagctggtggcccgggagcaggagatcacggctgtgcaggcacgcatgcaggccagctaccgggagcacgtgaaggaggtgcagcagctgcagggcaagatccggactcttcaggagcagctggagaatggccccaacacgcagctggcccgcctgcagcaggagaactccatcctgcgggatgccttgaaccaggccacgagccaggtggagagcaagcagaacgcagagctggccaagcttcggcaggagctcagcaaggtcagcaaagagctggtggagaagtcagaggctgtgcggcaagatgagcagcagcggaaagctctggaagccaaggcagctgccttcgagaagcaggtcctgcagctgcaggcgtcccacagggagagtgaggaggccctgcagaagcgcctggacgaggtcagccgggagctgtgccacacgcagagcagccacgccagcctccgggcggatgccgagaaggcccaggagcaacagcagcagatggccgagctgcacagcaagttacagtcctccgaggcggaggtgcgcagcaaatgcgaggagctgagtggcctccacgggcagctccaggaggccagggcggagaactcccagctcacagagagaatccgttccattgaggccctgctggaggcgggccaggcgcgggatgcccaggacgtccaggccagccaggcggaggctgaccagcagcagactcgcctcaaggagctggagtcccaggtgtcgggtctggagaaggaggccatcgagctcagggaggccgtcgagcagcagaaagtgaagaacaatgacctccgggagaagaactggaaggccatggaggcactggccacggccgagcaggcctgcaaggagaagctgctctccctgacccaggccaaggaggaatcggagaagcagctctgtctgattgaggcgcagaccatggaggccctgctggctctgctcccagaactctctgtcttggcacaacagaattacaccgagtggctgcaggatctcaaagagaaaggccccacgctgctgaagcacccgccagctcccgcggagccctcctcggacctggcctccaagttgagggaggccgaggagacgcagagcacactgcaggccgagtgtgaccagtaccgcagcatcctggcggagacggagggcatgctcagagacctgcagaagagcgtggaggaggaggagcaggtgtggagggccaaggtgggcgccgcagaggaggagctccagaagtcccgggtcacagtgaagcatctcgaagagattgtagagaagctaaaaggagaacttgaaagttcggaccaggtgagggagcacacgtcgcatttggaggcagagctggaaaagcacatggcggccgccagcgccgagtgccagaactacgccaaggaggtggcagggctgaggcaacttctcctagaatctcaatctcagctcgatgccgccaagagcgaagcccagaaacagagcgatgagcttgccctggtcaggcagcagttgagtgaaatgaagagccacgtagaggatggtgacatagctggggccccagcttcctccccagaggcgcccccagccgagcaggaccccgttcagctgaagacgcagctggagtggacagaagccatcctggaggatgagcagacacagcggcagaagctcacggccgagtttgaggaggctcagacctcggcatgtcggttacaagaagaattggagaagctccgcacagccggccccctagagtcttcagaaacagaggaggcctcacagctgaaggagagactagaaaaagagaagaagttaacaagtgacctggggcgcgccgccacgagactgcaggagcttctgaagacgacccaggagcagctggcaagggagaaggacacggtgaagaagctgcaggaacagctggaaaaggcagaggacggcagcagctcaaaggagggcacctctgtctgagtttcctctttggaaaaagaagttactgttcaacttaccaaaatgccttacacattccttacaaataaaccaaccaacctacacagcgttatccaggcccaacttccggtagctccgagagaagccatgagagacaagtctcttagagccacagaagtagaccttccagagccccagtttgtaaatgaacctgtgtcacatttgataaacactatcctgggcgcagccccgggccaccgccgagtgacgccaaagccctggttgactctgacagccccgtgggtgtgtgggaggccgggcgctctggggtctgtctgtcagtgcaatcgtttagtgttttttcagtggggcggggcgggaagcgggtgggaccgggcagccagttctcaaaggctgtggggccgactggaggccacagcccctcacccctagacgttgccaaccagaactgacgtgtgacctcctgggtgttgatgccattaaaaccaacgttggtgcccggt

SEQ ID NO: 414 - protein, 1410 aa, Homo sapiens
MDIYDTQTLGVVVFGGFMVVSAIGIFLVSTFSMKETSYEEALANQRKEMAKTHHQKVEKKKKEKTVEKKGKTKKKEEKPNGKIPDHDPAPNVTVLLREPVRAPAVAVAPTPVQPPIIVAPVATVPAMPQEKLASSPKDKKKKEKKVAKVEPAVSSVVNSIQVLTSKAAILETAPKEVPMVVVPPVGAKGNTPATGTTQGKKAEGTQNQSKKAEGAPNQGRKAEGTPNQGKKTEGTPNQGKKAEGTPNQGKKAEGTPNQGKKAEGAQNQGKKVDTTPNQGKKVEGAPTQGRKAEGAQNQAKKVEGAQNQGKKAEGAQNQGKKGEGAQNQGKKAEGAQNQGKKAEGAQNQGKKAEGAQNQGKKAEGAQNQGKKAEGAQNQGKKAEGAQNQGKKVEGAQNQGKKAEGAQNQGKKAEGAQNQGKKAEGAQNQGKKAEGAQNQGKKAEGAQNQGKKAEGAQNQGKKAEGAQNQGKKVEGAQNQGKKAEGAQNQGKKAEGAQNQGKKAEGAQNQGQKGEGAQNQGKKTEGAQGKKAERSPNQGKKGEGAPIQGKKADSVANQGTKVEGITNQGKKAEGSPSEGKKAEGSPNQGKKADAAANQGKKTESASVQGRNTDVAQSPEAPKQEAPAKKKSGSKKKGEPGPPDADGPLYLPYKTLVSTVGSMVFNEGEAQRLIEILSEKAGIIQDTWHKATQKGDPVAILKRQLEEKEKLLATEQEDAAVAKSKLRELNKEMAAEKAKAAAGEAKVKKQLVAREQEITAVQARMQASYREHVKEVQQLQGKIRTLQEQLENGPNTQLARLQQENSILRDALNQATSQVESKQNAELAKLRQELSKVSKELVEKSEAVRQDEQQRKALEAKAAAFEKQVLQLQASHRESEEALQKRLDEVSRELCHTQSSHASLRADAEKAQEQQQQMAELHSKLQSSEAEVRSKCEELSGLHGQLQEARAENSQLTERIRSIEALLEAGQARDAQDVQASQAEADQQQTRLKELESQVSGLEKEAIELREAVEQQKVKNNDLREKNWKAMEALATAEQACKEKLLSLTQAKEESEKQLCLIEAQTMEALLALLPELSVLAQQNYTEWLQDLKEKGPTLLKHPPAPAEPSSDLASKLREAEETQSTLQAECDQYRSILAETEGMLRDLQKSVEEEEQVWRAKVGAAEEELQKSRVTVKHLEEIVEKLKGELESSDQVREHTSHLEAELEKHMAAASAECQNYAKEVAGLRQLLLESQSQLDAAKSEAQKQSDELALVRQQLSEMKSHVEDGDIAGAPASSPEAPPAEQDPVQLKTQLEWTEAILEDEQTQRQKLTAEFEEAQTSACRLQEELEKLRTAGPLESSETEEASQLKERLEKEKKLTSDLGRAATRLQELLKTTQEQLAREKDTVKKLQEQLEKAEDGSSSKEGTSV

SEQ ID NO: 415 - DNA, 107 bp, Homo sapiens
actccacctgtgcagactgcagctcagcctcgtccatgcttcgtgactcagccttgtcctcagggaagctggggctggtgcaactttcagaagtggtcccagtgccg

SEQ ID NO: 416 - DNA, 2492 bp, Homo sapiens
agtgccaccgccgggagccccgggtctcggcttcagccccgggctgaacaagcagggaggggagaggcacttaggcctcgcctccccgcggccttcctcccccagccggggcggaggagacccaggaagctgggcccggctcccgggggtggagggcctaggcctcggcccgcccgaggcggagcccgggaggtcggggcggggtcccgggccggtcacccacctgggttgccagtcattccagctccgcgaatagttggtgccgttggtgccaccgccgccgctcagccgagaccccggggctctgcggctcattaccttccccgacacgacatggccaagcgccgccgcccagagaagcgcgagtcgccgcccgaaccggccgccgccaacaccccgctccggcccggggctgaggaggaagccgagaaggaggagaaggaggaggcggcggcgggcgggggaagaggacgaccgttccgggttccgcctgagcccgcagcacaggacgaggaggcgggagcggcgcggtgagagagaggtggatgaaggggaggcgacgtctcttccagggccgtgcgcggcccacgtcgccggggccgcggaggacgaggacgacgaggagcaggcggtggcggcagctcctcacgctcacaaggccactgctaacccgcctcccggctccgctggccgcgccgccgctatcgcacgggattcgcagaggcatttttggaacatctttggaaaaaattgcaggatccaagtaatcctgccatcatcaggcaggctgctggaaattatattggaagctttttggcaagagctaaatttattcctcttattactgtaaaaccatgcctagatcttttggttaactggctgcacatataccttaataaccaggattcgggaacaaaggcattctgcaatgttgctctccatggaccattttactcagcctgccaagctgtgttctacacctttgtttttagacacaagcagcttttgagcggaaacctgaaagaaggtttgcagtatcttcagagtctgaattttgagcggatagtgatgagccagctaaatcccctgaagatttgcctgccctcagtggttaacttttttgctgcaatcacaaataagtaccagctcgtcttctgctacaccatcatcgagaggaacaatcgccagatgctgccagtcattaggagtaccactggaggagactcagtgcagacctgcacaaacccactggacaccttcgtcccctttgatccctgtgtgctgaagaggtgaggtctgtgcagaccctgggtgaggggcgagttggctatggcctgtttaactccacctgtgcagactgcagctcagcctcgtccatgcttcgtgactcagccttgtcctcagggaagctggggctggtgcaactttcagaagtggtcccagtgccgttggtggttgcctgacgaaaagctgcacttaatagaaatcactgtggatgcaggagatggacggtgatgagctcaggaccagccagcaaccccatcaggcggtaatgcctaccatggtcacccatgacttcctctcgccactgctcggagctcctgcaaagccacaggcaacaacacatttctgctccgtacgagaagctcctattgtaagtcggtgacatggctggggttttctctcagcaaatattgagcaaacactgactgtgccaggtgatgtgctgggtcccaaacccttcccagacccagccctggcactcacggagatccagctaggaagtccgggaaaaggtcatcggggaaataaacaaagtcaagcacagtggatgaacgcgctgctgccgctccccacacctcttgtggtggacatcacttacgcttcctcatggtgcatgtcacttatgcttcctggtgccctcccagatgacccccccttgggccactacacacagctgcacccggcaagagcagacaaggatggtctactcactgagcctgcaaggctggtgtgcaggacaggccagctacactccccaggtgtgtgcaagaccggggacgagtcagtcattgggaggtgaggtgctcgggcagtgtgggatggaggaggagggagggaaactgagtgtgggctcttcgtattggagaggaggggacggccatggcacaaagactcagatgggaaagtgtgagaaagcagagatttcaaaggagctacggtggagacccacagaagaggaatgctgaggcttttctgtctgaaatgctgaatagactctagcacacgcaaaacagcccaccacagcgagctgcaggattcttccgggcttttaacagtggtcttgtaaaaaaaattagccgggcatggttgtcccagctactcaggaggcagagaggggaggatggcttgcgcccaggaggttgaggctgcagtgagccatgatcgcaccactgcactccagcctgggtgacagaatgagacccctgact

SEQ ID NO: 417 - skipped

SEQ ID NO: 418 - DNA, 99 bp, Homo sapiens
ggaagggagggagacaagcacaagctgaagaaatccgaactgaaggagctcatcaacaatgagctttcccatttcttagaggaaatcaaagagcaggag

SEQ ID NO: 419 - DNA, 1109 bp, Homo sapiens
gccgcccaggacccgcagcagagacgacgcctgcagcaaggagaccaggaaggggtgagacaaggaagaggatgtctgagctggagaaggccatggtggccctcatcgacgttttccaccaatattctggaagggagggagacaagcacaagctgaagaaatccgaactgaaggagctcatcaacaatgagctttcccatttcttagaggaaatcaaagagcaggaggttgtggacaaagtcatggaaacactggacaatgatggagacggcgaatgtgacttccaggaattcatggcctttgttgccatggttactactgcctgccacgagttctttgaacatgagtgagattagaaagcagccaaacctttcctgtaacagagacggtcatgcaagaaagcagacagcaagggcttgcagcctagtaggagctgagctttccagccgtgttgtagctaattaggaagcttgatttgctttgtgattgaaaaattgaaaacctctttccaaaggctgttttaacggcctgcatcattctttctgctatattaggcctgtgtgtaagctgactggccccagggactcttgttaacagtaacttaggagtcaggtctcagtgataaagcgtgcaccgtgcagcccgccatggccgtgtagaccctaacccggagggaaccctgactacagaaattaccccggggcacccttaaaacttccactacctttaaaaaacaaagccttatccagcattatttgaaaacactgctgttctttaaatgcgttcctcatccatgcagataacagctggttggccggtgtggccctgcaagggcgtggtggcttcggcctgcttcccgggatgcgcctgatcaccaggtgaacgctcagcgctggcagcgctcctggaaaaagcaactccatcagaactcgcaatccgagccagctctgggggctccagcgtggcctccgtgacccatgcgattcaagtcgcggctgcaggatccttgcctccaacgtgcctccagcacatgcggcttccgagggcactaccgggggctctgagccaccgcgagggcctgcgttcaataaaaagagcgcagcttggga

SEQ ID NO: 420 - protein, 92 aa, Homo sapiens
MSELEKAMVALIDVFHQYSGREGDKHKLKKSELKELINNELSHFLEEIKEQEVVDKVMETLDNDGDGECDFQEFMAFVAMVTTACHEFFEHE

SEQ ID NO: 421 - DNA, 104 bp, Homo sapiens
ttctccaggccgacatgactaagtatctggaaggctcactgtaccccagcacccagcagtacaatgacgtggttaatgccctgctgcaggcccaccctttcctg

SEQ ID NO: 422 - DNA, 1891 bp, Homo sapiens
atgtgggtcctacttcctcttcttgctaacggaaaacaatgagaagcagcaagttacaatctccttctcctagccaggagaagcaaggggtgtatttacaggagacagcaatggaaacctggtcagttgagcaggtctgcagttggttggtggagaaaaatttaggagagctagttcatagatttcaagaggaagaagtaagtggggccgctcttcttgcacttaatgatcggatggttcagcaactggtaaagaaaattgggcaccaggctgttctgatggatttaattaaaaaatacaagcagaacactcaaggactgaagtccccagaaaaccccaaaaaggcagccctggtcatgcaaacagaagcagctcgagattacagggatgaagagtcctccagtccagccaggcatggggagcagatgccatctttctatccagctgaaaaccttgataatggactaattgaccaaagagtattgaaacagagaagaaatgtgaaacaaattctagcaagaagcaaagcattacagtggacgaagtcctatgttttaccagagtttccctatgatgtcaaatgcatgttagcagagcagaagtgcccggatcacagcatgaggataaggatcattgagtttctccaggccgacatgactaagtatctggaaggctcactgtaccccagcacccagcagtacaatgacgtggttaatgccctgctgcaggcccaccctttcctggatgaggatggctgtggcttctttttatggaaacgagccctcaaagatcgctttaaatatgttcgaagacccatagaagatgatgagcaagtgattagaaataagtgtaaatttggacaccgaagaggccagacaaggaaatctcttgctgatataagatttgatgaaattaaacttgtccagataaaagaagaagctgtttgttttgattctgagctagatgaacatattaagtggttccagcaagaatacgtgaaaacagaaaaggactggagagaaattgacaagagaatgagccaaactttggaaataagaagaaagatgattggcagccgaacacctctgaaggacattcttaaactgtttcctttcttgaagtgcccttatcagatgttcagagaattccaacttcttacaagaacagatatttataagaaaacaaggcacattttggaatcctattcagaaaatatactgacttctttttcagtggtggacaatccaatcaatattgtattgcaagaaaaaatgaaacattacacagatgaagacatgttgaaatacatgaagatgacagccacatgtttactcctcccagatgtttttggggatgatcccagcctttttgtcatcatgaatgaacaggtgcaagtgtccacacctgtgttggaagttaaaaaccctttcaacatggaggtctgcgaattttctttatatttagaaagggagaggctcacaaaggtggacgactgtgttacagccttggctgcgctagtagctgcctttcatgtatttaggattgagtgtccaagaagactgtcccaaactttcaacttcctagaaacgctgattttcgatatgcacagtccttattttccttctttgaaagaaaaggaaaacgaagtaggatttcagcacccactcacttaatagcatgccaaatattgtactggaatttacctctgggaaaactgaagcttcataagaaattgttttgatttagggttgtggtagaggtaggtatgagaaaatcatcttgtatttatagatgctaatgaatttcaatgctttctatctttacacttagatattaagttctttgtgaaattctgtaataaaattctacttcattaaagagctgtcgattt

SEQ ID NO: 423 - protein, 544 aa, Homo sapiens
MRSSKLQSPSPSQEKQGVYLQETAMETWSVEQVCSWLVEKNLGELVHRFQEEEVSGAALLALNDRMVQQLVKKIGHQAVLMDLIKKYKQNTQGLKSPENPKKAALVMQTEAARDYRDEESSSPARHGEQMPSFYPAENLDNGLIDQRVLKQRRNVKQILARSKALQWTKSYVLPEFPYDVKCMLAEQKCPDHSMRIRIIEFLQADMTKYLEGSLYPSTQQYNDVVNALLQAHPFLDEDGCGFFLWKRALKDRFKYVRRPIEDDEQVIRNKCKFGHRRGQTRKSLADIRFDEIKLVQIKEEAVCFDSELDEHIKWFQQEYVKTEKDWREIDKRMSQTLEIRRKMIGSRTPLKDILKLFPFLKCPYQMFREFQLLTRTDIYKKTRHILESYSENILTSFSVVDNPINIVLQEKMKHYTDEDMLKYMKMTATCLLLPDVFGDDPSLFVIMNEQVQVSTPVLEVKNPFNMEVCEFSLYLERERLTKVDDCVTALAALVAAFHVFRIECPRRLSQTFNFLETLIFDMHSPYFPSLKEKENEVGFQHPLT

SEQ ID NO: 424 - DNA, 107 bp, Homo sapiens
cagtagcagatatgcttcaagatgtgtatcatgtggtcacattgaaaattcagttacacagttgccccaaactagaagacttgcctcccgaacaatggtcgcacacc

SEQ ID NO: 425 - DNA, 7918 bp, Homo sapiens
actttctcgctcgctcccgttccccggacgcggcggatgagccggccccgctggggaaggctccgggcggcggcgggcggccgggaggaggctgcgtgctcggggctggggctgcgagcggggtgattttgtattaaaatgaggaggaggaagaagaggcacccacagcggcagcggcggcggcggcggcagcagcagcaggagcagcggcggagagggctgcagcccgggcggacgcgcggagccgagcggggcacggcggcggcagcgacagcggccgggatgagtcaactaataatttaatgggggcagagacggcagcgaggggtagagctagcgagggagagagcgagagaagcagccccgtccggggactcgcgctcacactcacgcacacacacaaacacacacacacctctccctgtgccacccagcaacacccggcctcgtcacaacaacaacagccgcggccgccctctatcctgcccgggggcccagccgaaagccagggcgactctagaggacgctgcccgcccccctctttcatttcgggaaactcctgatcagttttgtcggggtttctgggtttcttttcccccaaagtcctagtgccattgtggtgctcgttgtttacctcggactctggacgagtgagagcttggcgactttttggggggagggggcggggagtttgtcgctgcctaggcggtggaggtggctgggggtgccttctgatcttcctcctcctccccctccccccgaacctcttctctcctcacttgctgggaccccagacgctcacagccccgcgtcaatgggcagggagagggtccttgcggctgttgtcagcgagggcagaatcaaaagtggcattttagtgcctttccggggcttttctcgcgaccccctgccccccaccctcgctgtcccccgctagatgccctcgttgggggtgcgaggctgtggggaaaagtttaaggtttgttaatattagtcgcgattgttggcgaggggggtgggggtgattggaagggaggcgaggtggccttcccaatgcgcgttattcggggttattgaagaataatattgcaagtgacagccagaagtagactttctgtcctcacaccgaagaacccgagtgagcaggagggagggagagacgcgaagagaccttttttcctttttggagaccttgtccgcagtgatttttttttttttaagagaatcctcagtcaccacgtcgtttccccagcaccatcacagtgtacagctcataacgggttttgctttgtttttacgatttccccccaacgaatcacttgtcagatcaattttatcttcttcctcctccctgcttcccactctcccctcctccccatcgcaaaccctgttctctgaggttagacattttacaaacccctatatgttggttttcgaattgtgattttttttttaaacccctttctcatggctactcttctagacgtttatttctgcccttcccccgcttaggggggcgggggtaggggaaaggaaaataatacaatttcaggggaagtcgccttcaggtctgctgcttttttatttttttttttttaattaaaaaaaaaaaggacatagaaaacatcagtcttgaacttctcttcaagaacccgggctgcaaaggaaatctcctttgtttttgttatttatgtgctgtcaagttttgaagtggtgatctttagacagtgactgagtatggatcatttgaacgaggcaactcaggggaaagaacattcagaaatgtctaacaatgtgagtgatccgaagggtccaccagccaagattgcccgcctggagcagaacgggagcccgctaggaagaggaaggcttgggagtacaggtgcaaaaatgcagggagtgcctttaaaacactcgggccatctgatgaaaaccaaccttaggaaaggaaccatgctgccagttttctgtgtggtggaacattatgaaaacgccattgaatatgattgcaaggaggagcatgcagaatttgtgctggtgagaaaggatatgcttttcaaccagctgatcgaaatggcattgctgtctctaggttattcacatagctctgctgcccaggccaaagggctaatccaggttggaaagtggaatccagttccactgtcttacgtgacagatgcccctgatgctacagtagcagatatgcttcaagatgtgtatcatgtggtcacattgaaaattcagttacacagttgccccaaactagaagacttgcctcccgaacaatggtcgcacaccacagtgaggaatgctctgaaggacttactgaaagatatgaatcagagttcattggccaaggagtgccccctttcacagagtatgatttcttccattgtgaacagtacttactatgcaaatgtctcagcagcaaaatgtcaagaatttggaaggtggtacaaacatttcaagaagacaaaagatatgatggttgaaatggatagtctttctgagctatcccagcaaggcgccaatcatgtcaattttggccagcaaccagttccagggaacacagccgagcagcctccatcccctgcgcagctctcccatggcagccagccctctgtccggacacctcttccaaacctgcaccctgggctcgtatcaacacctatcagtcctcaattggtcaaccagcagctggtgatggctcagctgctgaaccagcagtatgcagtgaatagacttttagcccagcagtccttaaaccaacaatacttgaaccaccctccccctgtcagtagatctatgaataagcctttggagcaacaggtttcgaccaacacagaggtgtcttccgaaatctaccagtgggtacgcgatgaactgaaacgagcaggaatctcccaggcggtatttgcacgtgtggcttttaacagaactcagggcttgctttcagaaatcctccgaaaggaagaggaccccaagactgcatcccagtctttgctggtaaaccttcgggctatgcagaatttcttgcagttaccggaagctgaaagagaccgaatataccaggacgaaagggaaaggagcttgaatgctgcctcggccatgggtcctgcccccctcatcagcacaccacccagccgtcctccccaggtgaaaacagctactattgccactgaaaggaatgggaaaccagagaacaataccatgaacattaatgcttccatttatgatgagattcagcaggaaatgaagcgtgctaaagtgtctcaagcactgtttgcaaaggttgcagcaaccaaaagccagggatggttgtgcgagctgttacgctggaaagaagatccttctccagaaaacagaaccctgtgggagaacctctccatgatccgaaggttcctcagtcttcctcagccagaacgtgatgccatttatgaacaggagagcaacgcggtgcatcaccatggcgacaggccgccccacattatccatgttccagcagagcagattcagagcccctctcccaccacccttgggaaaggagagtctagaggcgttttcttaccaggcctgccgacccctgcaccatggctcggtgctgctcctcagcaacagcagcagcaacagcaacagcagcagcagcagcagcaggcaccgccgcctccacagccacagcagcagccacagacaggccctcggctccccccacggcaacccacggtggcctctccagcagagtcagatgaggaaaaccgacagaagacccggccacgaacaaaaatttcagtggaagccttgggaatcctccagagtttcatacaagacgtgggcctgtaccctgacgaagaggccatccagactctgtctgcccagctcgaccttcccaagtacaccatcatcaagttctttcagaaccagcggtactatctcaagcaccacggcaaactgaaggacaattccggtttagaggtcgatgtggcagaatataaagaagaggagctgctgaaggatttggaagagagtgtccaagataaaaatactaacacccttttttcagtgaaactagaagaagagctgtcagtggaaggaaacacagacattaatactgatttgaaagactgagataaaagtatttgtttcgttcaacagtgccactggtatttactaacaaaatgaaaagtccaccttgtcttctctcagaaaacctttgttgttcattgtttggccaatgaatcttcaaaaacttgcacaaacagaaaagttggaaaaggataatacagactgcactaaatgttttcctctgttttacaaactgcttggcagccccaggtgaagcatcaaggattgtttggtattaaaatttgtgttcacgggatgcaccaaagtgtgtaccccgtaagcatgaaaccagtgttttttgttttttttttagttcttattccggagcctcaaacaagcattataccttctgtgattatgatttcctctcctataattatttctgtagcactccacactgatctttggaaacttgccccttatttaaaaaaaaaaaagaaaaaaaagagtttgttactctattgtatgttacaaaagaactatagactgtggaatgcagtttaaagatgacatatgccaacaaatgccttgtattatatggcactgccgtaattcaaatttgtttttattttggaaataaaagttcactgtacttttttttcattctcattgttacatgattttttaaaaaaaggaaaagaaaatgtgaaacacaatttagtcctcattatttatttgtagatcctgcagcatcatgttgtaattaattttttggaagtttccgttaaatgtaatattgcttctcttgttaccatactgattcttttctatttataaatgtattttgatgggcagtaaaacaaagtgtcttaaaagttttaaatagagaaaatgtgctttacacagttgcctataaaaagtgctctatgttatccaagcaattcatactataagcttcactcttattgttgtatgcaatttttactatcatgcaaataagcttaggtaaataaaactaatagatcaccttagaaaattatgcaattaatgtgaaaataattgatgtttgcaatgtgtcttcctttggtttacaatcaattttaaagctacatctgtataaaatttctgtataaaggtgtatttcttttttatgagtttatggctatgaaaacagctattttgttacagctggctgtttttataagtgtatcacaattttctttatgcagaaatgttctgactaggagtggttattgactgtaactacacaattaaaattgtttgtatcgtatgacatggtagggtttgtctgcttatgtgaagtaactaaaggagtcaaaggatggccctctcatttaggtgcatgttaataacttgttatttcactgattttaaaaagagcaattgacaagttacttgaaacactgtaaatttaaatcacaaacacatgctcatttttaaataggtatgaaatttcacaatgaaaataacctgtttggttaacattttgcttaataagtagagataggatggtcaaaagactctccgacaaaaacaaatccagtctctagcagttatgttgttagaatggattcatctgtgcttatttcacaatacttcatttatagcaatgcttttccttaagctaatgtataaatatttctaaaggccattaatagtaacaaaataagtaggggaaaaaatggaccttctgtataaaaaccccttagcttttttttttcacaagttataagtggaataagttaataactgagctcgtaagtgtatctcataactataagagctacatgaagaaaataggaataacacacctggtatttaaacacaatcttcaaaattcttgcaacattaaacatagtaaaatgccagaatataaaatgaggtgtgctaatggtcacaggattgaggccagcattacagtttggggtgatttttcttttatttgctccctcactttgtttcctagatgctagtaggggtatctgggttgcttgagataccattttgcaattgccccttctctttctgcctaccatcttctcaggccctgatgagcttattggtaggcaactgggctgctttagtgttgaacttgtactttagaaactgaagtggaatcattgaaaactttcaataaagctttaaagttccatttacttttgaagcacagctaagctcctctgaaggcagctggtttgttgcaaacttaaaattgtactgaaaagttgccactttttatttagtaagaaaacaaacattctggctcactagagttcagaaaagtaataatttgagccaaaggaatttgaattaagaaaatagaaactaggtttcatgtatttaaaaaataggaaataaaatagaaactcaaatgccatgaagttatcttcctcttccttatatcccctaagtttgggttgcaaataactttccaattcctaataacctaaattattttgaaatagtgttttcagtgaaatgatgaatgtttgaatgtttgtttggtaatcaacataacaatgctaacaaaattcccacttagattttttaacttttaaaagtcagcgtggttttgataatttgatattttaaatgcccacacatacacacacacacacacacacacacacacaagcacatgttaataaactgataggatggagtgagcaaaattgttttcagggaagatggcacattttagaaaagacttgcccagatgatcttccatattgctcccccaatgtcatttatcgctcatgccaatcctcctcttgttacctgtggctatggtaaaattcctttaacaagcttcattgtgtccaagtatttcagagacttttaaaagctgggcatgacatagcgttttgtgctgttaagaccttagcagagtcaggtagtttacgggtaatattcaaccttgtgcatctgaatctgtcatggattcccttcactcagcactttgccactaatttgtattacactctgtggccatataatacttgcacattatgcaaaaaaaaatgttgatagtatctccttgccacacaatatgcagagttgacaacctttgaaaaccaaggtaactaatatgtatgtcctagttgtgtggcgcttggtaacaaagtctgtacatattatgtataaaatgtgtattggttagcatttagtactaagaaattctgagtttaaaataagtgatttttttcaaagtagcgatatctatatctgtgtttatctaaaaatactggcttgaatagaaaacattctcagatgattcaagattgagtaaaaatgagaatcccatacattccattattaaattctgccctattcccaattgttagcatctggctgatattaaggtctttgattgtcacaatattctcaataaatgagacattctgaactgcctggtgatattttcaaaaagagcaattaaaatgtgtattccctctaatacagctgatagaactgttgtgttaaagcaagttggaaatttgcatgatagtgtggaaaccaatggaggtccaaaatattaatcatatctaaaatatcagaaaatatcaatactagtcttctttatgcatatttttgactttttaagagggcttatgaattcaatgtttcttctgaggcaatccttttaatgtaaatactaaatacttgcatgtcttttgacaaaggctaaactacaatctattaatatgcacatttttgataaaatataaagtaccctaattaaagaaattgtggtagaaggtgtatgtcctgaatactatacctgtttaacaataccaaatgttaaataaaaatagtttgaaattaatgtttaaaa

SEQ ID NO: 426 - protein, 795 aa, Homo sapiens
MDHLNEATQGKEHSEMSNNVSDPKGPPAKIARLEQNGSPLGRGRLGSTGAKMQGVPLKHSGHLMKTNLRKGTMLPVFCVVEHYENAIEYDCKEEHAEFVLVRKDMLFNQLIEMALLSLGYSHSSAAQAKGLIQVGKWNPVPLSYVTDAPDATVADMLQDVYHVVTLKIQLHSCPKLEDLPPEQWSHTTVRNALKDLLKDMNQSSLAKECPLSQSMISSIVNSTYYANVSAAKCQEFGRWYKHFKKTKDMMVEMDSLSELSQQGANHVNFGQQPVPGNTAEQPPSPAQLSHGSQPSVRTPLPNLHPGLVSTPISPQLVNQQLVMAQLLNQQYAVNRLLAQQSLNQQYLNHPPPVSRSMNKPLEQQVSTNTEVSSEIYQWVRDELKRAGISQAVFARVAFNRTQGLLSEILRKEEDPKTASQSLLVNLRAMQNFLQLPEAERDRIYQDERERSLNAASAMGPAPLISTPPSRPPQVKTATIATERNGKPENNTMNINASIYDEIQQEMKRAKVSQALFAKVAATKSQGWLCELLRWKEDPSPENRTLWENLSMIRRFLSLPQPERDAIYEQESNAVHHHGDRPPHIIHVPAEQIQSPSPTTLGKGESRGVFLPGLPTPAPWLGAAPQQQQQQQQQQQQQQQAPPPPQPQQQPQTGPRLPPRQPTVASPAESDEENRQKTRPRTKISVEALGILQSFIQDVGLYPDEEAIQTLSAQLDLPKYTIIKFFQNQRYYLKHHGKLKDNSGLEVDVAEYKEEELLKDLEESVQDKNTNTLFSVKLEEELSVEGNTDINTDLKD

SEQ ID NO: 427 - DNA, 106 bp, Homo sapiens
gagggctcccagaagtgtgtggctgagctgggtccccaggccgtgggggccgtgaaggccctgaaggccctgctgggggccctgacagtgtttggctgagccgaga

SEQ ID NO: 428 - DNA, 478 bp, Homo sapiens
agccgcaggttccccgcgcgccccgagcccccgcgccatgaagctcgccgccctcctggggctctgcgtggccctgtcctgcagctccgctgctgctttcttagtgggctcggccaagcctgtggcccagcctgtcgctgcgctggagtcggcggcggaggccggggccgggaccctggccaaccccctcggcaccctcaacccgctgaagctcctgctgagcagcctgggcatccccgtgaaccacctcatagagggctcccagaagtgtgtggctgagctgggtccccaggccgtgggggccgtgaaggccctgaaggccctgctgggggccctgacagtgtttggctgagccgagactggagcatctacacctgaggacaagacgctgcccacccgcgagggctgaaaaccccgccgcggggaggaccgtccatccccttcccccggcccctctcaataaacgtggttaagagca

SEQ ID NO: 429 - protein, 104 aa, Homo sapiens
MKLAALLGLCVALSCSSAAAFLVGSAKPVAQPVAALESAAEAGAGTLANPLGTLNPLKLLLSSLGIPVNHLIEGSQKCVAELGPQAVGAVKALKALLGALTVFG

SEQ ID NO: 430 - DNA, 103 bp, Homo sapiens
aaaactacctaaaataaagattataaaaaagtaaggatgaatggacggtctttgattggcggcgctggtgacgcccgtcatggtcctgtttggaaggaccctt

SEQ ID NO: 431 - DNA, 4226 bp, Homo sapiens
acgcagcagaacaaaatctgggcattggtccctgtgtaggatggcttcccgttattttttttttaagcaaagtaaatgaacatcaaatttccatagtcagctgctgtctttctgcccactgagagctctttggtgaaggcaaagtcctccttcttcattagcggtctcccatgtggggccacatcttccctcaccaggaacccagtgggcgcgctccagcccccctcagcttgccttttgcgtggtcattagagctagggcacacgtcatgctgattcacatatttttgccctttgtcatgtattgagaaaaagtaaggatgaatggacggtctttgattggcggcgctggtgacgcccgtcatggtcctgtttggaaggacccttttggaactaaagctggtgacgcagcgcgcagaggcatcgcccggctaagcttggccctggcagatgggtcgcaggaacaggagccagaggaagagatagccatggaggacagccccactatggttagagtggacagccccactatggttaggggtgaaaaccaggtttcgccatgtcaagggagaaggtgcttccccaaagctcttggctatgtcaccggtgacatgaaagaacttgccaaccagcttaaagacaaacccgtggtgctccagttcattgactggattctccggggcatatcccaagtggtgttcgtcaacaaccccgtcagtggaatcctgattctggtaggacttcttgttcagaacccctggtgggctctcactggctggctgggaacagtggtctccactctgatggccctcttgctcagccaggacaggtcattaatagcatctgggctctatggctacaatgccaccctggtgggagtactcatggctgtcttttcggacaagggagactatttctggtggctgttactccctgtatgtgctatgtccatgacttgcccaattttctcaagtgcattgaattccatgctcagcaaatgggacctccccgtcttcaccctccctttcaacatggcgttgtcaatgtacctttcagccacaggacattacaatccattctttccagccaaactggtcatacctataactacagctccaaatatctcctggtctgacctcagtgccctggagttgttgaaatctataccagtgggagttggtcagatctatggctgtgataatccatggacagggggcattttcctgggagccatcctactctcctccccactcatgtgcctgcatgctgccataggatcattgctgggcatagcagcgggactcagtctttcagccccatttgaggacatctactttggactctggggtttcaacagctctctggcctgcattgcaatgggaggaatgttcatggcgctcacctggcaaacccacctcctggctcttggctgtgccctgttcacggcctatcttggagtcggcatggcaaactttatggctgaggttggattgccagcttgtacctggcccttctgtttggccacgctattgttcctcatcatgaccacaaaaaattccaacatctacaagatgcccctcagtaaagttacttatcctgaagaaaaccgcatcttctacctgcaagccaagaaaagaatggtggaaagccctttgtgagaacaagccccatttgcagccatggtcacgagtcatttctgcctgactgctccagctaacttccagggtctcagcaaactgctgtttttcacgagtatcaactttcatactgacgcgtctgtaatctgttcttatgctcattttgtattttcctttcaactccaggaatatccttgagcatatgagagtcacatccaggtgatgtgctctggtatggaatttgaaaccccaatggggccttggcactaagactggaatgtatataaagtcaaagtgctccaacagaaggaggaagtgaaaacaaactattagtatttattgatattcttggtgtttagctggctcgatgatgttaacagtattaaaaattaaaccccataaaccaactaagccttatggaattcacagtcacaaaatcgaagttaatccagaattctgtgataagcagcttggctttttttttaaatcaatgcaagttacacattatagccagaatctgtatcacagaggtgcaagctgacagcagagctcagtccccacttcctgcaaacaatggcctgcaccctatcccttgtgtgtgtgacattctctcatgggacaatgttggggtttttcagactgacaggactgcaagagggagaaaggaattttgtcaatcaaaattattctgtattgcaacttttctcagagattgcaaaggattttttaggtagagattatttttccttatgaaaaatgatctgttttaaatgagataaaataggagaagttcctggcttaacctgttcttacatattaaagaaaagttacttactgtatttatgaaatactcagcttaggcatttttactttaacccctaaattgattttgtaaatgccacaaatgcatagaattgttaccaacctccaaagggctctttaaaatcatattttttattcatttgaggatgtcttataaagactgaaggcaaaggtcagattgcttacgggtgttatttttataagttgttgaattccttaatttaaaaaagctcattattttttgcacactcacaatattctctctcagaaatcaatggcatttgaaccaccaaaaagaaataaagggctgagtgcggtggctcacgcctgtaatcccagcactttggggagcccaggcgggcagattgcttgaacccaggagttcaagaccagcctgggcagcatggtgaaaccctgtatctacaaaaaatacaaaaattagccaggcatggtggtgggtgcctgtagttccagctacttgggaggctgaggtgggaaaatgacttgagcccaggaggaggaggctgcagtgagctaagattgcaccactgcactccaacctgggcgacaagagtgaaactgtgtctctcaaaaaaaaaaaaaaacaaacaaaaacaaaaacaaaacaaaacaaaacaaaacaaaacaggtaaggattcccctgttttcctctctttaattttaaagttatcagttccgtaaagtctctgtaaccaaacatactgaagacagcaacagaagtcacgttcagggactggctcacacctgtaatcccagcactttgggagatggaggtaaaaggatctcttgagcccaggagttcaagaccagcttgggcaacatagcaagactccatctcttaaaaaataaaaatagtaacattagccaggtgtagcagcacacatctgcagcagctactcaggaggctgaggtggaaagatcgcttgtgcacagaagttcgaggctgcagtgagctatatgatcatgtcactgcactccagcctgtgtgaccgagcaagaccctatctcaaaaaaattaattaattaattaattaattaatttaaaaaggaagtcatgttcatttactttccacttcagtgtgtatcgtgtagtattttggaggttggaaagtgaaacgtaggaatcctgaagattttttccacttctagtttgcagtgctcagtgcacaatatacattttgctgaatgaataaacagaaatagggaagtaaacctacaaatattttagggagaagctcacttcttccttttctcaggaaaccaagcaagcaaacatatcgttccaattttaaaacccagtgaccaaagcctttggaactatgaatttgcaactgtcataggtttatggatattgctgtggagaagctcaattttcagtgtttgaactgaaccctttcttgttagggaacgtgtgaaagaagaattgtggggaaaaaaaagcaagcataaccaaagatcatcagcagtgaagaatctaggctgtggctgagagaaccagaggcctctaaaatggacccgagtcgatcttcagaacagggatctaccatgcaggagcttcttgtgctcacacaaatctgtaaatgggaacattgtacattgtcgaatttaaatgatattaattttctcaagctatttttgttactattttcctaaaattgaatatttgcagggagcacttatactttttcctaatgtctgtataacaaatttctatgcaagtacatgaataaattatgctcacagctca

SEQ ID NO: 432 - protein, 445 aa, Homo sapiens
MNGRSLIGGAGDARHGPVWKDPFGTKAGDAARRGIARLSLALADGSQEQEPEEEIAMEDSPTMVRVDSPTMVRGENQVSPCQGRRCFPKALGYVTGDMKELANQLKDKPVVLQFIDWILRGISQVVFVNNPVSGILILVGLLVQNPWWALTGWLGTVVSTLMALLLSQDRSLIASGLYGYNATLVGVLMAVFSDKGDYFWWLLLPVCAMSMTCPIFSSALNSMLSKWDLPVFTLPFNMALSMYLSATGHYNPFFPAKLVIPITTAPNISWSDLSALELLKSIPVGVGQIYGCDNPWTGGIFLGAILLSSPLMCLHAAIGSLLGIAAGLSLSAPFEDIYFGLWGFNSSLACIAMGGMFMALTWQTHLLALGCALFTAYLGVGMANFMAEVGLPACTWPFCLATLLFLIMTTKNSNIYKMPLSKVTYPEENRIFYLQAKKRMVESPL

SEQ ID NO: 433 - DNA, 104 bp, Homo sapiens
tttgccacattaacagctgactgcacatctgagccccgaggtgaagcagggcctcaggtagccagggaactggttgagcagaggaaatcggagagacctttttt

SEQ ID NO: 434 - DNA, 1930 bp, Homo sapiens
actctctgcgacggcccagatggagggcaggaggaacagcggttcagccctggctggggctgcaggggctggggtgtgttactcactggcacgatggagaactgcatgaagaggcagcggagtgctgtctgtccccacccttccccgcccggcctccaactggtgggaactggattttgcggctgcagaggacttccccaaattttgccacattaacagctgactgcacatctgagccccgaggtgaagcagggcctcaggtagccagggaactggttgagcagaggaaatcggagagacctttttttttgtcatgaacaggctcagtgtgaatgggggaacttcctggttctgagggaatgtgggaaaattgccctttaggctgggtgaagaagaaagcaagtggaaccctggcacccctggacttcctcctccagaggaagcggctttggttgtgggccagcgagcctgtgcgtccccagccccagggcattcaccgcttcagagaagcaaggcgacagttctgccggatgagaggatccaggctgactggaggaaggaagggctttggctcatctgggctcaggtttgggagaggtggcttctcagaggaggtgatgcctcagccagtcttaaaggcaatgcggtgtgcagagggtgcttggtggttctctcctgatggccccgcagggtctgcagcctccatctggccagcagagggcgcagaaggactgcctgggcagctcggacgtgaccgcctggaagtggtgtacagcgttcctgacaacgttcccggccaaaacgggtcccgccgcccacttgtgtgcaagataactggaaaatgtctttctgtgtgctccgaggagaatgcaaaggctggtggatgtagtgcctttcctctactgctctctcagctgggggcaagaatgacaggacgtgaacatgcacacaagggcccggaactcacgacccccgacagcggtctcccccgcccccccaaccccgcgcttgcaggatttagggcactagcacagcacagtccaccccttgggactagcaccccctccgcagttctgctctctgcagcaacatagagtacaaatattgttccttttgtttcttttttccctttggatacatttttaattacaaaaatagagcttgattgttgcacctagacagatgtttgcttgcttctgggcccattgggcctcctctcagagcctggaactcccagcccccagctcctggggtgccttcctccaggtgtgtccctggcttgggctggggggacacagccccgctcctgggacgtgcaggtttaaaatgctattgggtaccatctttgatcgaattcagagtgacagacttagagcaggtcacctctcagcttctaacgaggccaagacggaggaatccccacagcactgggtttgactctgtaattaagctggtaaagtggaaaaataaaagtaggaaacctaagtggaaaccaaaccagaaagccaggcagcccgggagttctgagccctgcttccttccagctgtgcggcctcagcggctgacgcggtctctgctgctcttctataacacaggatgatggcagctacaccctctgagtggtgtcaccaaggccaatgagtcctgatggttggagtgtgggtatccgggggcctctaggtcactacccactctagccctttgctcctagtctctggggaggtggcagcataggggcatggagcagactagactttgcctctttctgcccccaggccagttgatatgagccctgcttgaggggttcgcagggcctggggagccttcttcagcttctctttgttttcctaagatgaaaattgtgacatctgggcttgttgcgggaaatttgtaaattgtgcacagagaagaatatgaaattgcacataaa

SEQ ID NO: 435 - protein, 253 aa, Homo sapiens
MGELPGSEGMWENCPLGWVKKKASGTLAPLDFLLQRKRLWLWASEPVRPQPQGIHRFREARRQFCRMRGSRLTGGRKGFGSSGLRFGRGGFSEEVMPQPVLKAMRCAEGAWWFSPDGPAGSAASIWPAEGAEGLPGQLGRDRLEVVYSVPDNVPGQNGSRRPLVCKITGKCLSVCSEENAKAGGCSAFPLLLSQLGARMTGREHAHKGPELTTPDSGLPRPPNPALAGFRALAQHSPPLGTSTPSAVLLSAAT

SEQ ID NO: 436 - DNA, 96 bp, Homo sapiens
gagatctcgctgggccagttcatgaaggccggcagcatcaatgtctggaacatctgtcccctgttcaaaggcctgggctacgcctccatggtgatc

SEQ ID NO: 437 - DNA, 3931 bp, Homo sapiens
gaagagagggatagtcggagcgaggtggcgagtcgctgagcccgccgcggccccgagagcggctgcagccgccgccgccgggaaggagagggcgaggcgcgcccgagccgccgccgccgccgccaccgccgccgccgccaccaccgccaccggagtcgcgggccagccgggcagcctccgcgggccccggccggggcggggggcgcgggccacaggcccctgctccggccgccgcttgcagaccgcgggcgccgatgtcgcccgcgccccgctaggctgagcctcgggtcgggcgaggagccgccgcagccgccgccgcccgagccgcgggcaggagcctcgggagccgccgccgccgccgccgccgcccggccgggccccgccgccgcccgcgcgcccccgggcccccgacacacatgagattcttcaggctcactttcaagtgcttcgtggactgcttctgactgcgccgcccgcgccccgcaccccgccgcccgcccgccgccccgtcccccggcccggccgccccccggcccccggccggcccgcgccctcggggccctccccggtgccgccggtgccccccgcctgaccgccgccccccgtgaggcgccgcgaccccggcccggccgtgcggcccgccgaggccatggcgaagaagagcgccgagaacggcatctatagcgtgtccggcgacgagaagaagggccccctcatcgcgcccgggcccgacggggccccggccaagggcgacggccccgtgggcctggggacacccggcggccgcctggccgtgccgccgcgcgagacctggacgcgccagatggacttcatcatgtcgtgcgtgggcttcgccgtgggcttgggcaacgtgtggcgcttcccctacctgtgctacaagaacggcggaggtgtgttccttattccctacgtcctgatcgccctggttggaggaatccccattttcttcttagagatctcgctgggccagttcatgaaggccggcagcatcaatgtctggaacatctgtcccctgttcaaaggcctgggctacgcctccatggtgatcgtcttctactgcaacacctactacatcatggtgctggcctggggcttctattacctggtcaagtcctttaccaccacgctgccctgggccacatgtggccacacctggaacactcccgactgcgtggagatcttccgccatgaagactgtgccaatgccagcctggccaacctcacctgtgaccagcttgctgaccgccggtcccctgtcatcgagttctgggagaacaaagtcttgaggctgtctgggggactggaggtgccaggggccctcaactgggaggtgaccctttgtctgctggcctgctgggtgctggtctacttctgtgtctggaagggggtcaaatccacgggaaagatcgtgtacttcactgctacattcccctacgtggtcctggtcgtgctgctggtgcgtggagtgctgctgcctggcgccctggatggcatcatttactatctcaagcctgactggtcaaagctggggtcccctcaggtgtggatagatgcggggacccagattttcttttcttacgccattggcctgggggccctcacagccctgggcagctacaaccgcttcaacaacaactgctacaaggacgccatcatcctggctctcatcaacagtgggaccagcttctttgctggcttcgtggtcttctccatcctgggcttcatggctgcagagcagggcgtgcacatctccaaggtggcagagtcagggccgggcctggccttcatcgcctacccgcgggctgtcacgctgatgccagtggccccactctgggctgccctgttcttcttcatgctgttgctgcttggtctcgacagccagtttgtaggtgtggagggcttcatcaccggcctcctcgacctcctcccggcctcctactacttccgtttccaaagggagatctctgtggccctctgttgtgccctctgctttgtcatcgatctctccatggtgactgatggcgggatgtacgtcttccagctgtttgactactactcggccagcggcaccaccctgctctggcaggccttttgggagtgcgtggtggtggcctgggtgtacggagctgaccgcttcatggacgacattgcctgtatgatcgggtaccgaccttgcccctggatgaaatggtgctggtccttcttcaccccgctggtctgcatgggcatcttcatcttcaacgttgtgtactacgagccgctggtctacaacaacacctacgtgtacccgtggtggggtgaggccatgggctgggccttcgccctgtcctccatgctgtgcgtgccgctgcacctcctgggctgcctcctcagggccaagggcaccatggctgagcgctggcagcacctgacccagcccatctggggcctccaccacttggagtaccgagctcaggacgcagatgtcaggggcctgaccaccctgaccccagtgtccgagagcagcaaggtcgtcgtggtggagagtgtcatgtgacaactcagctcacatcaccagctcacctctggtagccatagcagcccctgcttcagccccaccgcacccctccagggggcctgcctttccctgacacttttggggtctgcctgggggaggaggggagaaagcaccatgagtgctcactaaaacaactttttccatttttaataaaacgccaaaaatatcacaacccaccaaaaatagatgcctctccccctccagccctagccgagctggtcctaggccccgcctagtgccccacccccacccacagtgctgcactcctcctgcccctgccacgcccaccccctgcccacctctccaggctctgctctgcagcacacccgtgggtgacccctcaccccagaagcagcagtggcagcttgggaaatgtgaggaagggaaggagggagagacgggagggaggagagagaggagaagggaggcaggggaggggcagcagaaccaaggcaaatatttcagctgggctatacccctctccccatccctgttatagaagcttagagagccagccagcaatggaaccttctggttcctgcgccaatcgccaccagtatcaattgtgtgagcttgggtgcgagtgcacgcgtgcgtgagtacggagagtatatatagatctctatctcttagcaaaggtgaatgccagatgtaaatggcgcctctgggcaaaggaggcttgtattttgcacattttataaaaacttgagagaatgagatttctgcttgtatatttctaaaaagaggaaggagcccaaaccatcctctccttaccactcccatccctgtgagccctaccttacccctctgcccctagccaaggagtgtgaatttatagatctaactttcataggcaaaacaaaagcttcgagctgttgcgtgtgtgagtctgttgtgtggatgtgcgtgtgtggtccccagccccagactggattggaaaagtgcatggtgggggcctcggggctgtccccacgctgtccctttgccacaagtctgtggggcaagaggctgcaatattccgtcctgggtgtctgggctgctaacctggcctgctcaggcttcccaccctgtgcggggcacacccccaggaagggaccctggacacggctcccacgtccaggcttaaggtggatgcacttcccgcacctccagtcttctgtgtagcagctttaacccacgtttgtctgtcacgtccagtcccgagacggctgagtgaccccaagaaaggcttccccgacacccagacagaggctgcagggctggggctgggtgagggtggcgggcctgcggggacattctactgtgctaaaaagccactgcagacatagcaataaaaacatgtcattttccaaa

SEQ ID NO: 438 - protein, 635 aa, Homo sapiens
MAKKSAENGIYSVSGDEKKGPLIAPGPDGAPAKGDGPVGLGTPGGRLAVPPRETWTRQMDFIMSCVGFAVGLGNVWRFPYLCYKNGGGVFLIPYVLIALVGGIPIFFLEISLGQFMKAGSINVWNICPLFKGLGYASMVIVFYCNTYYIMVLAWGFYYLVKSFTTTLPWATCGHTWNTPDCVEIFRHEDCANASLANLTCDQLADRRSPVIEFWENKVLRLSGGLEVPGALNWEVTLCLLACWVLVYFCVWKGVKSTGKIVYFTATFPYVVLVVLLVRGVLLPGALDGIIYYLKPDWSKLGSPQVWIDAGTQIFFSYAIGLGALTALGSYNRFNNNCYKDAIILALINSGTSFFAGFVVFSILGFMAAEQGVHISKVAESGPGLAFIAYPRAVTLMPVAPLWAALFFFMLLLLGLDSQFVGVEGFITGLLDLLPASYYFRFQREISVALCCALCFVIDLSMVTDGGMYVFQLFDYYSASGTTLLWQAFWECVVVAWVYGADRFMDDIACMIGYRPCPWMKWCWSFFTPLVCMGIFIFNVVYYEPLVYNNTYVYPWWGEAMGWAFALSSMLCVPLHLLGCLLRAKGTMAERWQHLTQPIWGLHHLEYRAQDADVRGLTTLTPVSESSKVVVVESVM

SEQ ID NO: 439 - DNA, 106 bp, Homo sapiens
acacaaatgaagaaactagagatcaaacttcgacattttgaagagctggaaactatcatggacagagagaaagaagctctagaacaacagaggcagcagttgctta

SEQ ID NO: 440 - DNA, 6354 bp, Homo sapiens
agtggcggctacgcgcgcgggggtgcgcgcgggaacgaccgggaaacaccgcgagggccggggtgggccaggctgtggggacgacgggctgcgacgatggccgcagcggcgggcggcggcgggccggggacagcggtaggcgccacgggctcggggattgcggcggcagccgcaggcctagctgtttatcgacggaaggatgggggcccggccaccaagttttgggagagcccggagacggtgtcccagctggattcggtgcgggtctggctgggcaagcactacaagaagtatgttcatgcggatgctcctaccaataaaacactggctgggctggtggtgcagcttcttcagttccaggaagatgcctttgggaagcatgtcaccaacccggccttcaccaaactccctgcaaagtgtttcatggatttcaaagctggaggcgccttatgtcacattcttggggctgcttacaagtataaaaatgaacagggatggcggaggtttgacctacagaacccatctcgaatggatcgtaatgtggaaatgtttatgaacattgaaaaaacattggtgcagaacaattgtttgaccagacccaacatctacctcattccagacattgatctgaagttggctaacaaattgaaagatatcatcaaacgacatcagggaacatttacggatgagaagtcaaaagcttcccaccacatttacccatattcttcctcacaagacgatgaagaatggttgagaccggtgatgagaaaagagaagcaagtgttagtgcattggggcttttacccagacagctatgatacttgggtccatagtaatgatgttgatgctgaaattgaagatccaccaattccagaaaaaccatggaaggttcatgtgaaatggattttggacactgatattttcaatgaatggatgaatgaggaggattatgaggtggatgaaaataggaagcctgtgagttttcgtcagcggatttcaaccaagaatgaagagccagtcagaagtccagaaagaagagatagaaaagcatcagctaatgctcgaaagaggaaacattcgccttcgcctccccctccgacaccaacagaatcacggaagaagagtgggaagaaaggccaagctagcctttatgggaagcgcagaagtcagaaagaggaagatgagcaagaagatctaaccaaggatatggaagacccaacacctgtacccaatatagaagaagtagtacttcccaaaaatgtgaacctaaagaaagatagtgaaaatacacctgttaaaggaggaactgtagcggatctagatgagcaggatgaagaaacagtcacagcaggaggaaaggaagatgaagatcctgccaaaggtgatcagagtcgatcagttgaccttggggaagataatgtgacagagcagaccaatcacattattattcctagttatgcatcatggtttgattataactgtattcatgtgattgaacggcgtgctcttcctgagttcttcaatggaaaaaacaaatccaagactccagaaatatacttggcatatcgaaattttatgattgacacgtatcgtctaaacccccaagagtatttaactagcactgcttgtcggaggaacttgactggagatgtgtgtgctgtgatgagggtccatgcctttttagagcagtggggactcgttaattaccaagttgacccggaaagtagacccatggcaatgggacctcctcctactcctcattttaatgtattagctgataccccctctgggcttgtgcctctgcatcttcgatcacctcaggttcctgctgctcaacagatgctaaattttcctgagaaaaacaaggaaaaaccagttgatttgcagaactttggtctccgtactgacatttactccaagaaaacattagcaaagagtaaaggtgctagtgctggaagagaatggactgaacaggagacccttctactcctggaggccctggagatgtacaaggatgattggaacaaagtgtcggaacatgttggaagtcgtactcaggatgaatgcatcctccactttttgagacttcccattgaggacccataccttgagaattcagatgcttcccttgggcctttggcctaccagcctgtccccttcagtcagtcaggaaatccagttatgagtactgttgcttttttggcatctgtggtggaccctcgcgtggcatctgctgcagcaaaagcggctttggaggagttttctcgggtccgggaggaggtaccactggaattggttgaagctcatgtcaagaaagtacaagaagcagcacgagcctctgggaaagtggatcccacctacggtctggagagcagctgcattgcaggcacagggcccgatgagccagagaagcttgaaggagctgaagaggaaaaaatggaagccgaccctgatggtcagcagcctgaaaaggcagaaaataaagtggaaaatgaaacggatgaaggtgataaagcacaagatggagaaaatgaaaaaaatagtgaaaaggaacaggatagtgaagtgagtgaggataccaaatcagaagaaaaggagactgaagagaacaaagaactcactgatacatgtaaagaaagagaaagtgatactgggaagaagaaagtagaacatgaaatttccgaaggaaatgttgccacagccgcagcagctgctcttgcctcagcggctaccaaagccaagcacctggctgcagtggaagaaagaaagatcaagtccctggtagctctcttggttgagacacaaatgaagaaactagagatcaaacttcgacattttgaagagctggaaactatcatggacagagagaaagaagctctagaacaacagaggcagcagttgcttactgaacgccaaaacttccacatggaacagctgaagtatgctgaattacgagcacgacagcaaatggaacagcagcagcatggccagaaccctcaacaggcacaccagcactcaggaggacctggcctggccccacttggagcagcagggcaccctggcatgatgcctcatcaacagccccctccctaccctctgatgcaccaccagatgccaccacctcatccaccccagccaggtcagataccaggcccaggttccatgatgcccgggcagcacatgccaggccgcatgattcccactgttgcagccaacatccacccctctgggagtggccctacccctcctggcatgccaccaatgccaggaaacatcttaggaccccgggtacccctgacagcacctaacggcatgtatccccctccaccacagcagcagccaccgccaccaccacctgcagatggggtccctccgcctcctgctcctggcccgccagcctcagctgctccttagcctggaagatgcagggaacctccacgcccaccaccatgagctggagtggggatgacaagacttgtgttcctcaactttcttgggtttctttcaggatttttcttctcacagctccaagcacgtgtcccgtgcctccccactcctcttaccacccctctctctgacactttttgtgttgggtcctcagccaacactcaaggggaaacctgtagtgacagtgtgccctggtcatccttaaaataacctgcatctcccctgtcctggtgtgggagtaagctgacagtttctctgcaggtcctgtcaactttagcatgctatgtctttaccatttttgctctcttgcagttttttgctttgtcttatgcttctatggataatgctatataatcattatctttttatctttctgttattattgttttaaaggagagcatcctaagttaataggaaccaaaaaataatgatgggcagaagggggggaatagccacaggggacaaaccttaaggcattataagtgaccttatttctgcttttctgagctaagaatggtgctgatggtaaagtttgagacttttgccacacacaaatttgtgaaaattaaacgagatgtggaaggagaacctcagtgattttattccctagtgaggcctctgagggcctccacactgcctggcagaacataccactgaactagtatgtgctagaggagggcacaaacatccgctccttccctaggcctgctggctctggttttctatgcagatgattcattggattgggggtgagtgttttgtttttctgggggcagtgtgagctttgagggttggaatattgggaggcattccttagtttcctcaactagcctggaaagttaggagtctagggtaattacccccaatgagtctagcctactattcactgctttgtgtgcatttttttctccctctttaaaaaaccctttaaaagaaaaaaaaaagtagatagtgctaaatattttagctcatgaaacttggttaggatggctgggggtacaagtccccaaactacctcttgttacagtagccagggagtggaatttcgtcaaccggtacttttaaggttaggatgggacgggaaaagtgaagcaggatattagctccttataccttctcccttccatttctgagatctcacattccatctatcacagggttttcaaagagatgctgagggtaacaaggaactcacttggcagtcagagcatcatgctttgaggtttggggtgctcaggctgggagggtagaatgccattccagaggacaagccacaaaaatgccttaatttgagctcgtatttacccctgctgataagtgacttgagagttcccggttttttcctcttgtccttccctcccttctgtccttccatgtgtggggaaagggtgtttttggtagagcttggtttccaaagcgcctggctttctcacttcacattctcaagtggcagtttcattatttagaatgcaaggtggacatcttttggatatctttttctatatattttctaaagctttacatatgagagggtatagggaggtgtttataaaacacttgagaacttttttccttaatatcagaaagcaaaaaaataaaaccacaattgagatttgcctttcaaaccctcaggtttgcctctaaccaggtgtccctggtcaccatcagagtactggaatacgggaaccgaggagaccttggtccttttgtttttgttctggactcttgggagtggaaatgagaatgagtttattcctactggagcttagttccaatgcatttggctccagaaagaccccagtgccttttgacaatggccagggttttacctacttcctgccagtctttcccaaaggaaactcattccaaatacttcttttttcccctggagtccgagaaggaaaatggaattctggttcatactgtggtcccttgtaacctcaggtctttaatgtgatcactttcaaatttaaaagatccaggtggaaatatttttactatagtaataattctacaaaatacctgaattcttaacactgttatatttcagtataagtggtggctttttcttttcatgtctttgatctggttttattcctgtaattcagccacctgattttgtgaggggggggaataatatgtggtttttgtacaaacatgtttctcagtgtgttgttattttggaaaaaatgaggggagggagtttggcaagaatggagaaaatgaatgaagaaggcctaatctctctctttttcagtgaataaatggaacaccatttctggattctagtcccattctctgcattcatacaccagtttcttcatatatcctatgaagaacctaaacatttggccccacctggtcttggtttgatcagcagttaaaattctgtgactcgggcttccttcccgactgcccaccttcatgatgtgtaaggaacatacattttgagggtacctcacccactgttcatttgcatggtcaaagtgaaaatgagtggaagttctccaaaaatgatggccaacatcctggcacctccaggtgtgagaaatagctttgcttggtgaatgggataatgtttgtcaggatgcagtttagacagtcccaagttggaggcaggccttgagggcagaagattctgtgaaccttgggggacagcttttgggtactcacagatataaaccctgtgcagaaaaaaagaagtgattgttttcaggatgcttataaatcgagtgaagcaaaagaagaggattctgtgtctgccatgagatgaacgccctgctcttcacgaaggtgtgcctctaataaagagagccaaagccagctgggtctcaccagattcctatactttctcaaggatgttgggggaggttaatcctttatcgaaactaaagactggtttataaa

SEQ ID NO: 441 - protein, 1105 aa, Homo sapiens
MAAAAGGGGPGTAVGATGSGIAAAAAGLAVYRRKDGGPATKFWESPETVSQLDSVRVWLGKHYKKYVHADAPTNKTLAGLVVQLLQFQEDAFGKHVTNPAFTKLPAKCFMDFKAGGALCHILGAAYKYKNEQGWRRFDLQNPSRMDRNVEMFMNIEKTLVQNNCLTRPNIYLIPDIDLKLANKLKDIIKRHQGTFTDEKSKASHHIYPYSSSQDDEEWLRPVMRKEKQVLVHWGFYPDSYDTWVHSNDVDAEIEDPPIPEKPWKVHVKWILDTDIFNEWMNEEDYEVDENRKPVSFRQRISTKNEEPVRSPERRDRKASANARKRKHSPSPPPPTPTESRKKSGKKGQASLYGKRRSQKEEDEQEDLTKDMEDPTPVPNIEEVVLPKNVNLKKDSENTPVKGGTVADLDEQDEETVTAGGKEDEDPAKGDQSRSVDLGEDNVTEQTNHIIIPSYASWFDYNCIHVIERRALPEFFNGKNKSKTPEIYLAYRNFMIDTYRLNPQEYLTSTACRRNLTGDVCAVMRVHAFLEQWGLVNYQVDPESRPMAMGPPPTPHFNVLADTPSGLVPLHLRSPQVPAAQQMLNFPEKNKEKPVDLQNFGLRTDIYSKKTLAKSKGASAGREWTEQETLLLLEALEMYKDDWNKVSEHVGSRTQDECILHFLRLPIEDPYLENSDASLGPLAYQPVPFSQSGNPVMSTVAFLASVVDPRVASAAAKAALEEFSRVREEVPLELVEAHVKKVQEAARASGKVDPTYGLESSCIAGTGPDEPEKLEGAEEEKMEADPDGQQPEKAENKVENETDEGDKAQDGENEKNSEKEQDSEVSEDTKSEEKETEENKELTDTCKERESDTGKKKVEHEISEGNVATAAAAALASAATKAKHLAAVEERKIKSLVALLVETQMKKLEIKLRHFEELETIMDREKEALEQQRQQLLTERQNFHMEQLKYAELRARQQMEQQQHGQNPQQAHQHSGGPGLAPLGAAGHPGMMPHQQPPPYPLMHHQMPPPHPPQPGQIPGPGSMMPGQHMPGRMIPTVAANIHPSGSGPTPPGMPPMPGNILGPRVPLTAPNGMYPPPPQQQPPPPPPADGVPPPPAPGPPASAAP

SEQ ID NO: 442 - DNA, 106 bp, Homo sapiens
ttacgagtggggaaattcctgcaccagagggataagctttgggcacggatgggtttccgggctgttgtgagccgccagtgctgtgaggaggtcatggcaaaggagc

SEQ ID NO: 443 - DNA, 991 bp, Homo sapiens
gaaggccctgattggtggacgggctgctttgggcagggccgccctcaggctatataagcgcactcgcggcggcgttggtgttatgctctgggccattcctgagctcgggtcaccctgccccatctccatctcctatgagatgagtgactcccaagaccccaccacttcccctgtagttaccacccaggtagagctggggggctgcagccggcaaggtgggggcaatgggttcctccgttttcgccagcaccaggaggtccaggccttcctcagccttctggaggacagttttgtccaggaattcctctccaaagacccctgcttccagatttcagataagtatctcctggccatggtgctggtctacttccagcgcgcccacctgaagctcagcgagtatacccacagcagcctgttcttggccctgtaccttgcaaacgacatggaggaggacctggagggccccaaatgtgagatttttccatgggccctgggaaaagattggtgtttacgagtggggaaattcctgcaccagagggataagctttgggcacggatgggtttccgggctgttgtgagccgccagtgctgtgaggaggtcatggcaaaggagccattccactgggcttggactcgggaccggcgcccccaccatggtggggttcagagggtctgtccacaggtccctgttcgccttccccggggccctggcctctcgccgccccactgttccccctgtggtttgccccagcactgcagcagccacttgcttaagcctgtgtcatccaagtgcccttctctgacctctgaatgtcatcgccctccctcccaaaattatctctcaagggtcaaaaacgcctggggtggggactttctcatcgtcttgcctccccagatgcaactggaaccaggcacctactccctccgcatcttcccaaagcctccggcacgccctgggcactgaagctctgcagggtgaagaacagcacgc

SEQ ID NO: 444 - protein, 293 aa, Homo sapiens
MLWAIPELGSPCPISISYEMSDSQDPTTSPVVTTQVELGGCSRQGGGNGFLRFRQHQEVQAFLSLLEDSFVQEFLSKDPCFQISDKYLLAMVLVYFQRAHLKLSEYTHSSLFLALYLANDMEEDLEGPKCEIFPWALGKDWCLRVGKFLHQRDKLWARMGFRAVVSRQCCEEVMAKEPFHWAWTRDRRPHHGGVQRVCPQVPVRLPRGPGLSPPHCSPCGLPQHCSSHLLKPVSSKCPSLTSECHRPPSQNYLSRVKNAWGGDFLIVLPPQMQLEPGTYSLRIFPKPPARPGH

SEQ ID NO: 445 - DNA, 101 bp, Homo sapiens
cctccactcctttcagaacgacaattattctccaagcatgacgatgagtgtgtgatccccccttctccgagacgctgagagagcaggcattgcaggcggga

SEQ ID NO: 446 - DNA, 3252 bp, Homo sapiens
agaccagcggcggcggcggcggcggcggcggcagcggtgctggaggcgcagagggcggcgcaggcggagccgggcgggcgcgcgagcgagcggagagcgggcggccgtgcgggcggcggcggcggcacccccaggccgagccggcgcggaaggagttccagggcgatggggccgcggccggggctgacgctttgacagctggaaagagcgcggagccagcgcctgggggggagggaggggagcgcggcgaggagagcgccagcgagcgagagagcgagcgagcgccggggagggggccgggagcgaggggcagctcgggagagccggagcggtagcggcggcggcggcggcggcggcgaggctcggcgccctcttccctgcaaaccatgtttgccaaaggcaaaggctcggcggtgccctcggatgggcaggctcgggaaaagttagctttatacgtctacgaatatttactgcacgtaggagcacagaaatctgcacagaccttcttatcggagattcgatgggaaaaaaacatcacgttgggagaaccgcctgggtttttgcactcgtggtggtgtgtattttgggacctttactgtgcagctcctgaaaggagagacacttgtgaacattcaagtgaagcaaaagcctttcatgattatagtgcagcagctgccccgagccccgtgcttggcaacattccccccaacgatgggatgccgggaggccccatcccgccaggtttctttcagggtcctccggggtcacagccctcgccgcacgcacagcctccacctcacaatcctagcagcatgatgggaccccacagtcagccttttatgtcaccgcgatacgcaggcggccccaggcccccgatcagaatgggaaaccagcctccgggaggagttcctgggacacagccattgctgcccaattctatggatcccacacgacaacaaggccaccccaacatgggaggatcaatgcagagaatgaaccctccccgaggcatggggcccatgggtcccggcccacagaattacggcagcggcatgagaccaccacccaactccctcggccccgccatgcccgggattaacatgggcccgggagctggcagaccctggcccaatcctaacagtgctaactcaattccatactcctcctcatcacctggtacctatgtgggaccccctggtggtggcggtcctccaggaacacccattatgcccagtcccgcagattcaacaaattccagtgacaacatctacacaatgattaatccagtgccgcctggaggcagccggtccaacttcccgatgggtcccggctcggacggtccgatgggcggcatgggtggcatggagccacaccacatgaatggatcattagggtcaggcgacatagacggacttccaaaaaattctcctaacaacataagtggcattagcaatcctccaggcacccctcgagatgacggcgagctaggagggaacttcctccactcctttcagaacgacaattattctccaagcatgacgatgagtgtgtgatccccccttctccgagacgctgagagagcaggcattgcaggcgggaagatgccagaaattatgcaagaagtgaggtgtcattatccaggagctggtggggagggcatctccctgctcccctcaaccccctcccaccccatccacgccccctacctttcccaattttagtttcatgcaataaaaaggccaaactttttattccataaaacaagaaggacaaaactctcaaaaatgtatttcaagtcagtgaccagaaaaatcccaccccttgccctttccccaaaggaccttttctgtacatgacacttttttgttgttttttgtttggggttttaccattgttgggatttttttatttgttttcaggggggttttttgggggaaaatttttttaaatggaagcttctagcaagccccccaccccaatcaacctctatgctttcttcttaaaaaaaaaaaaaaaggaaaaaggaaaaaaaaaaaaggaaaaccagaagccctgctgtctgtctgtgcccaagcccttccaccagaaaagctagtctaggtgtgagagcccacattgtctgtagccatcaaaaataataataataaactggacagtttacaatcgttggtttctttcaaaaggccttttttggaaagaagaaaaggcagtcaccgttttccacttggggttttggtttgtgcaacaggcaggggaggagtggggacgcgtttgttctagcttgatttccatggcaacagcagcggcacgcttggaccccagaacccagcaccctcatcctgtggccagaggggccggaccactgacccctttcaggattccaccacagcccagaccgtcaccgtgacccggtggcatgcactgttcccaggacaccctcctcctctcctggacctcccttccgtcctggcctccctgcctctccagcccctcctctgcccccaccccagtcttcccagtgagaatcctgccagctgggtggtggcctggcgcagagtgggagaggctgccactgacaggatggctatgacctgggacatggaaacagtgacctccgcgttctggtcccgagatcctcgcatcagcgtcatcgtgtgcaccggcttggggggctggagttccggttttctttgttttttctctttattcgtcctttctcaaagatgggatactgatcagaattgctctgtatatgcttgggactggatggaaagactttggagcagctgtggggggtggggggacaccgacaaccaaacagacgtgctggctccagtcctgtttttactttcaaaaaccaacaagcccgacagtggagcctgtcccctcccgggagggtgctcatggccccactcacctcatcaccccacggaaacctttgtgtcttgccctggaagacacccgaattctttgtacattgacatgcccttctccttcctccctcccctgtagctggtctttgttttactccctccctttctgatccatgtatatcatattatgtgagatatcatctgcctgaaaaaagactttgtgcggattattgggaacattgtagctgtttctgtgttttttcttaccttgtagtctggttctgaattaagagaggaaaaaaaagtaattatgatacattgtagtttgtgtacgatatatgttgataacgttttattaaagggacatcttttttccgca

SEQ ID NO: 447 - protein, 388 aa, Homo sapiens
MFAKGKGSAVPSDGQAREKLALYVYEYLLHVGAQKSAQTFLSEIRWEKNITLGEPPGFLHSWWCVFWDLYCAAPERRDTCEHSSEAKAFHDYSAAAAPSPVLGNIPPNDGMPGGPIPPGFFQGPPGSQPSPHAQPPPHNPSSMMGPHSQPFMSPRYAGGPRPPIRMGNQPPGGVPGTQPLLPNSMDPTRQQGHPNMGGSMQRMNPPRGMGPMGPGPQNYGSGMRPPPNSLGPAMPGINMGPGAGRPWPNPNSANSIPYSSSSPGTYVGPPGGGGPPGTPIMPSPADSTNSSDNIYTMINPVPPGGSRSNFPMGPGSDGPMGGMGGMEPHHMNGSLGSGDIDGLPKNSPNNISGISNPPGTPRDDGELGGNFLHSFQNDNYSPSMTMSV

SEQ ID NO: 448 - DNA, 105 bp, Homo sapiens
gggacattcttcaagaaatctccccagaagagattcagccaaaccccccatcctctgggatgcttggtatcatcatcatgatgacgctgtgtgaccaggtggata

SEQ ID NO: 449 - DNA, 4604 bp, Homo sapiens
gctcttcttccttccttctccagtcccttccactgtgcgtcttctgtcccccgttcttccccagcggacccctctttcgagactccctagtggggtccccagctcccgggcgatcctgcccttgccgagcgcgttttctggagtcacctgggggaggggagtcctgggcagggccgggctggggaagacgcctggggcactgcccggcgttaacaaagggagccgataccgaccggcgtgggcgcggagcgggcggccgccaccgagcgtgctgagcaaccgcagcctccgcggccgagagtgcagcgagcaaggggagagccagttgcgcagagccctgcaaccagcagtccagggagaagtggtgaatgtcatggagcccagctgaaatggactggcccccttgagcctgtcccaagccctggtgccaggtgtccatccccgtgctgagatgagttttgatcatcctgagaaaaatgggccttggcctgcagacccaataaaccttccctcccatggataatagtgctaattcctgaggacctgaagggcctgccgcccctgggggattagccagaagcaggcttgttttcctgctcagaacaaagtgacttccctgaacacatcttcattatgattcacaccaacctgaagaaaaagttcagctgctgcgtcctggtctttcttctgtttgcagtcatctgtgtgtggaaggaaaagaagaaagggagttactatgattcctttaaattgcaaaccaaggaattccaggtgttaaagagtctggggaaattggccatggggtctgattcccagtctgtatcctcaagcagcacccaggacccccacaggggccgccagaccctcggcagtctcagaggcctagccaaggccaaaccagaggcctccttccaggtgtggaacaaggacagctcttccaaaaaccttatccctaggctgcaaaagatctggaagaattacctaagcatgaacaagtacaaagtgtcctacaaggggccaggaccaggcatcaagttcagtgcagaggccctgcgctgccacctccgggaccatgtgaatgtatccatggtagaggtcacagattttcccttcaatacctctgaatgggagggttatctgcccaaggagagcattaggaccaaggctgggccttggggcaggtgtgctgttgtgtcgtcagcgggatctctgaagtcctcccaactaggcagagaaatcgatgatcatgacgcagtcctgaggtttaatggggcacccacagccaacttccaacaagatgtgggcacaaaaactaccattcgcctgatgaactctcagttggttaccacagagaagcgcttcctcaaagacagtttgtacaatgaaggaatcctaattgtatgggacccatctgtataccactcagatatcccaaagtggtaccagaatccggattataatttctttaacaactacaagacttatcgtaagctgcaccccaatcagcccttttacatcctcaagccccagatgccttgggagctatgggacattcttcaagaaatctccccagaagagattcagccaaaccccccatcctctgggatgcttggtatcatcatcatgatgacgctgtgtgaccaggtggatatttatgagttcctcccatccaagcgcaagactgacgtgtgctactactaccagaagttcttcgatagtgcctgcacgatgggtgcctaccacccgctgctctatgagaagaatttggtgaagcatctcaaccagggcacagatgaggacatctacctgcttggaaaagccacactgcctggcttccggaccattcactgctaagcacaggctcctcactcttctccatcaggcattaaatgaatggtctcttggccaccccagcctgggaagaacattttcctgaacaattccagcctgctccttttactctaggggcctctgtcagcaagaccatggggacttcaagagcctgtggtcaggaaatcaggtccagccttccctgtagccagacagtttatgagcccagagcctcctgccacacacatgcacacatatctagcattctttccagacagcatcctccccgccttccaccttggtagatgcaaggtctatctctcccatcagggctgccaaagctgggctttgtttttcccagcagaatgatgccattctcacaaaccaatgctctatattgcttgaagtctgcatctaaatattgatttcacgttttaaagaaattctcttaaattacaattgtgcccaatgcagggtggctctggggggcaagtaggtggtacaggggattggaaacatgctccgcgcctccagagaaaagttgctcccgaggtccatgcccctggaacgtgttcctatcactctggctggttgggctggtccttagactgggtgcttatgattaaagggtcttggttagcccactttccctctccatgtggagatggaaggtagagaaggatacagtgtctatcctcaagttgctacggttcagtgagagaggcagacatctgaacaggcaggtaggattcagtgtgctcagtgcactggggatttggagagagatgggcttgctctctctgtgcacccaggagggccacgcacttaaaactgtgtttgtggatcagagaaggctttatagcacagggggcattcagatgagtcttagaggaagagaagaaacatggcaagcagattacatctgagccgtttgaattgtgtttttctttcttcccatgtttattttctaagatctacctgaacttagagactcaagatatttttttaggaaacctcctacccatgtctgaggtagcaagtgcagcctcacgacagataccaggcaatccagagccacaaaacgtgattcctccaggctctgcctggcctgaccctgtcctgtcagctgggtttacataccagtcccattcttccttttcaatacctacccccaaatcttctcctaaccaccatctgttttttttttttaaagcattttttgctttaaaagcatcctgaccccaatttctttgagctcacgggccttttgctgaaggtctctcagggtgtagtggtgtggctctctggacttaacgtcactctcagaggtcagaaccttggagatcagaactgattctcaccaggtgtgagaggtgtggtagcagattgcaatgctctgcacctcttccttgcaagtgagcaacttcaggctctctgggcagaggctggcccactgtagtttgcagacatgctctccagatggttttactaagtcccctctccctgatagggaatcctgctggaccagcgcagccctggtgtggagaggttaaaagacttgcacaggatcaccaagtcatgctgtagagccaggattcctagacccagggctctgcactctcaaggctggccccatgtgctcaaggggatctaatgtttgggctccaaactaaccatctcggagctgggctcctcatttactgccaaaccctcagcttatgtagctagaaagggccctggagtgagaaagcctggattttcaaattgatgctcccctactgactagctgtgccactctgggcaaatgctcttccttgagcctgtttccacacctgtaaagtggggatgatgatcctatctcactgcttttgtgaggattacaggaaagcacctgtcctggctctgtacctggcacgtagtaggtgctcagttcatgctggtttccttcctgcctttagtagggacctgctctgtgctcacacctcggctgcatgcaccctgctgtgacggaggctagtgtggaagaggtcctgtcctcagggaattaactgtcttattgggagacaacaactgtcctccttggaacacccaagaaaccatgcaaagcagtggacaacacagaacacgccctcctcctcgctgcctgcagctccaatctgattctgcttgggaatgggcggagcacgtgggctgcttaactgctgtataggacaagccccttacccctctctgggcccatgaattcctggcttggtttatgttctgatttgacacactgattttaatcttcgaatcatgacactgagtgcagaggaggtggcattccgacagcaggacatacatgttggtgtgaagactgggacgacactgggtagaatctagtttttaattattattaatataaaggatcaaattaatttaaatatgattctgaagtctacagaacttttagttctgtgctgtctatgtggacactttggtaaaatgcaaattatgatatggacgttatcattggtctggtgagatgtttcatatttgtgacagttaatttaaaaattatgagttaatgctgcctgtgtctatggggttctgtcttctttgatagccatctattcatctggatcatgggaccctctctaatccttccaccaatcaaataagctattgctattggtttggagttgagatatcagtctcggaaacttctgaaaaatgctaataattacccaaggattatgtcaaattttaaaataaatgtgtgtgtgtttctttaa

SEQ ID NO: 450 - protein, 406 aa, Homo sapiens
MIHTNLKKKFSCCVLVFLLFAVICVWKEKKKGSYYDSFKLQTKEFQVLKSLGKLAMGSDSQSVSSSSTQDPHRGRQTLGSLRGLAKAKPEASFQVWNKDSSSKNLIPRLQKIWKNYLSMNKYKVSYKGPGPGIKFSAEALRCHLRDHVNVSMVEVTDFPFNTSEWEGYLPKESIRTKAGPWGRCAVVSSAGSLKSSQLGREIDDHDAVLRFNGAPTANFQQDVGTKTTIRLMNSQLVTTEKRFLKDSLYNEGILIVWDPSVYHSDIPKWYQNPDYNFFNNYKTYRKLHPNQPFYILKPQMPWELWDILQEISPEEIQPNPPSSGMLGIIIMMTLCDQVDIYEFLPSKRKTDVCYYYQKFFDSACTMGAYHPLLYEKNLVKHLNQGTDEDIYLLGKATLPGFRTIHC

SEQ ID NO: 451 - DNA, 101 bp, Homo sapiens
cagagccttttagtaaaaaatccagagaaaagaccaacagcagagatatgcctttctcattcttggctacagcagtgggactttgaaaacttgtttcaccc

SEQ ID NO: 452 - DNA, 5273 bp, Homo sapiens
aaaccgcgactgcaagcttcggtagtcctctccgctgctgtcgccaggagtcacttcacgagaagccaggtcacaaccgtcggcccttgtctggaaaagtaaaagtggatcctgccacgttcggagctccctggcgcctcgcccggctggagctagagaactcgtcctgtggcggcccccggcgtggggcgggacagcggccccctggagggggcagtcccgggagaacctgcggcggccggagcggtaaaaataagtgactaaagaagcagacctgggaatcacctaacatgtcgaggaggagatttgattgccgaagtatttcaggcctactaactacaactcctcaaattccaataaaaatggaaaactttaataatttctatatacttacatctaaagagctagggagaggaaaatttgctgtggttagacaatgtatatcaaaatctactggccaagaatatgctgcaaaatttctaaaaaagagaagaagaggacaggattgtcgagcagaaattttacacgagattgctgtgcttgaattggcaaagtcttgtccccgtgttattaatcttcatgaggtctatgaaaatacaagtgaaatcattttgatattggaatatgctgcaggtggagaaattttcagcctgtgtttacctgagttggctgaaatggtttctgaaaatgatgttatcagactcattaaacaaatacttgaaggagtttattatctacatcagaataacattgtacaccttgatttaaagccacagaatatattactgagcagcatataccctctcggggacattaaaatagtagattttggaatgtctcgaaaaatagggcatgcgtgtgaacttcgggaaatcatgggaacaccagaatatttagctccagaaatcctgaactatgatcccattaccacagcaacagatatgtggaatattggtataatagcatatatgttgttaactcacacatcaccatttgtgggagaagataatcaagaaacatacctcaatatttctcaagttaatgtagattattcggaagaaactttttcatcagtttcacagctggccacagactttattcagagccttttagtaaaaaatccagagaaaagaccaacagcagagatatgcctttctcattcttggctacagcagtgggactttgaaaacttgtttcaccctgaagaaacttccagttcctctcaaactcaggatcattctgtaaggtcctctgaagacaagacttctaaatcctcctgtaatggaacctgtggtgatagagaagacaaagagaatatcccagaggatagcagcatggtttccaaaagatttcgtttcgatgactcattacccaatccccatgaacttgtttcagatttgctctgttagcacttttttctttgactcatttggactgaatttgaaattttatatccactccagtgagattatgatttgtagcttcatatatgacatgtttatattgtaaatgcacttttccatggaataatttagggaagtgttttaatgttaaattactagttgctagcatgttatgatttcatatcctgagatagctctgcagataagaaaatatttaaatatatgacaaaaagtaaaattgtacatgtgagtttacatgttaatgaaataattcaacttcaaatgaacttaccagaatgttttgcatatcaacaaaaaaagtggcttgagttttattatagttggtgtaaactgaacacagtgaagacattggaatttaataggttctctctctaaggtgactcttataccatgcctctatcaacataatttgtttaggaaagcagtatgaagtttaagccaaaataatttctactttatagatgctcaagagacattttacaattgaaaatgtctttcaattacaaatattttgaaacttcgtaagattttcattctctgtggtctgttatatgagagagatcctttaactagagcaaagagggagttagaaacctgatcagggatattctttacaagttggagcagaggaaagagtagcatgccttcgtattttaacgcaaatgtctttttcctcctcccaacctacttgagatctgataaggtctggaagatggagatatttggtatgcaagtgtagagttttttaatcctccagaatttctagagtagaagatacttaggtatagttaaatattctgtatttttagtcaaacatatttattaattgaatatagaagaaaatgttgacacactcagacagcttactgaattttagatgtcttctgcatcttagaatacaagccagtcattcagagttctaaaagtatgcataaaaaattacagcaccggtaggtctattaacacagtgcccgagtcagcggtagcaagactgatgtgatcataaaacatgacatcaggctcgtctgaagttcttgtgtgaaattcctagtgagtgaggaggctcagcttaaagccatctgcagagtggcccctcattgtggtcttttgctgggaccaatgcaagagactagggagagcaaaatgtttgcttatggctagagactatatccagccctaatgatggggaaagttagtccttttcgggtaatcttttatgaattttcacctgatgaccgttatattggtctgttatcatgttacgataactgtgatctcatgaccatgttgctgtatcagaagaaatagtttgacaaatggtaacaacaacctgatgttccccctttagacctttaacttctcaaaattttggtaagtttccaaattctttaataataacttaaaactttttgaataactatcaggtcactttatttgaccacatggtgaattcctttaatgtcttcagcatttgttaaggaaaagttttctctacttgtgtgtgtatgtgtgcacatgtgtgtatgtacaggtgtatgtatatatctatagatagatacaatacattctttagacacttttcaagattctttgctgtggtatattgtgctcaactcaggtgccaaaggagctttttttttttttttttttttttgagatggagttttgctctgtctctcaggctggagtgcagtggcatgatctcagctcacggcaacctctgcctcccgggttcaagcaattctcctgtctcagcctcctgagtagttgggattacaggcgcatgccaccgtgcccagctaatttttgtatttttagtagagacggggtttcaccatgttggccaggctggtcacaaactcctgacttcaagtgatccacccgcctcggcctcccaaagtgctgggattacaggcgtgagccactgcgcccccgcccaggagctcttttcttatgacatataaattatgacatttatattctttatatgactttatgttctcttcttatgacatttaaattctttaagtagtttgttggtccaataaactagacgttgtataatctaaattgagcccttgtatatctaaaactgatgagttgtttctaaattgttgattgtccatttacttgcctttggtattaagataatgcaagtaaagtttagtaagtcattggataatgaaatgattatgtttctgaagaccatattatatttttaatttttagaggaatcatgccatcccccaaaaaatcaagaaatatttgaattttaaattataagttcatttgttaaaagacatttttacaaatgtctgaaaatcttaaaatactttacatctacctttaagtagtagaatacagagctgtaaatttccatgccttttttcctgatattaagttttatagtaaaaaagcaactagtgattgcacaaagaatataaaaatccactctttttacaaaggtgtgaatttaaataacgttattgattggaatatgaaaatagaccaatcatttaagagctttttagcaaatgattcaattcttactctttttctcccaagattgaaaagcataatgtatttctctaaagtaggaatctagagagcccctgtgagtggacaaatgtcagtaacacttgaacacatgagaagataagtgttatgttgtgataatttaaagttaaatttgctttttgggtaggatccctaaatagatgggatttttaaatagatgatatatagatgacaattgcaattgtcattttaattattttccctacagtaaagaacctagctctgagcagtgaaattgtaatggcactttaaaggaagtaagccgttaactgttctctagtggagcgatctccaactgttttggcactagggacgggttttgtggaagaaaatttttccacaggactgggggtttagggggatggtttcaggatgattcaagtacattacatttatcattagattctcataaggagcatgcaacctagatctcttgcacgtgtggttcacagcaggattcgagctcctttgagaatctaatgccatggctgatctaacaggaaactgagctcaggcagtaatgcttggcaccgccccccaccttctatgcagcccggtcgtggcctggggactggggacccctgctctagtcagtaataaggtacttgtgccagaatataaatcaacacattgcttcctttatcaaagaagtcttgttatttaaaaaaagtcaactgagccagtatgattagtgatgtaattgattttcattctggcacaagcctctttcattctggacagctcacaaatagttaatggaccatgctttgaatagccttcctctaagcaacatttataaatactgatattttagaactgtttacatttcttctgtttatttttgaattttcagtttgatatcttgtccttattcattgttgtataaacaactgtactttaatttcaagtagtattaaaagtatttcacttcagtttggggggattattatcaatttataattttataaaagtattttaaagaataattgtaaattttccataaattacaacttcctgccatattttattaaataataatcttgcttaaggcatatagacagacattattatgagtattccagtaaaaaaaatctacatcaacttgaccattctggctaaaaattaaaaagcacttttttatatctgtggttgtcatttgtttcaaagcatttctaaatttattgttcttaaaagtatgtctgcatgttctagcctttgacctaggtcatctatgaaccctctttgtgtctaataaacatatctgtaaaggca

SEQ ID NO: 453 - protein, 372 aa, Homo sapiens
MSRRRFDCRSISGLLTTTPQIPIKMENFNNFYILTSKELGRGKFAVVRQCISKSTGQEYAAKFLKKRRRGQDCRAEILHEIAVLELAKSCPRVINLHEVYENTSEIILILEYAAGGEIFSLCLPELAEMVSENDVIRLIKQILEGVYYLHQNNIVHLDLKPQNILLSSIYPLGDIKIVDFGMSRKIGHACELREIMGTPEYLAPEILNYDPITTATDMWNIGIIAYMLLTHTSPFVGEDNQETYLNISQVNVDYSEETFSSVSQLATDFIQSLLVKNPEKRPTAEICLSHSWLQQWDFENLFHPEETSSSSQTQDHSVRSSEDKTSKSSCNGTCGDREDKENIPEDSSMVSKRFRFDDSLPNPHELVSDLLC

SEQ ID NO: 454 - DNA, 106 bp, Homo sapiens
gcgactagaacgggagaccttccaggtgctgaacatgtacgggaaggtggtgactgtcagacatcaggctgtgacccggaagaaggacaaccgctttgctgtggcc

SEQ ID NO: 455 - DNA, 3798 bp, Homo sapiens
gtgcagaggtggcagttccgggcgccggggaggtgtagagaacagattcggaaactggggaggtctagcatgtggcgtaggagggggtcctcactccgcttcgcgattgccaaaacgagcctgccggaagcgccctaaggggttttcttctcccagggaaccagcggggaaactgaggctcggggtggagcgcaggattgtgggacgcgccaaggctgctgtctttcccagcagcagcggaagatgtcggacagcgaggacagcaacttttccgaggaggaggacagcgagcgcagcagtgacggcgaggaggccgaggtagacgaagagcggcggagtgcagcgggcagtgagaaagaagaagagcctgaggacgaagaggaggaggaagaggaggaggaatacgatgaggaagaggaggaagaagatgatgaccgaccccccaagaaaccccgccatggaggcttcattctggacgaggctgatgttgacgatgagtatgaggacgaggaccagtgggaggatggagcagaggacattctagagaaagaagagattgaagcctccaatatcgataatgttgtcctggatgaagatcgttctggggctcgccgcctgcaaaacctctggagggaccagcgagaagaagaactgggcgagtattacatgaagaaatacgccaagtcatctgtgggagagacggtgtatggaggatctgatgagctctcagacgacatcacccagcagcagctgctcccaggagtcaaggatcccaatctgtggactgtcaaatgtaagattggggaggaacgggccacggccatttccttgatgcgcaagttcattgcctaccagttcacagacacgcccctgcagatcaagtcagtagtggcaccagagcatgtgaagggctacatctacgtggaggcctacaagcagacccacgtgaagcaggccattgagggggtgggcaacctgcggcttggctactggaaccagcagatggtgcccatcaaggagatgacagacgtgctcaaagtggtgaaggaggtggccaacctgaaaccaaagtcctgggtccgcctcaagcggggcatctacaaggatgacattgctcaggtggactacgtggagcccagccagaacaccatctccctgaagatgatcccacgcatcgactacgatcgcatcaaggcccgcatgagcttgaaagactggtttgccaaaaggaagaagtttaagcggcctccacagaggctgtttgatgctgagaagatcaggtccctggggggtgatgttgcctctgatggtgacttcctcatctttgaggggaaccgttacagccggaagggctttctgttcaagagcttcgccatgtctgctgtgatcacggagggtgtgaagccaacactctctgagctggaaaagtttgaggaccagccagagggcattgacctggaggtggtgactgagagcacagggaaggagcgggagcacaacttccaacctggggacaacgtggaggtctgtgagggtgagctcatcaacctgcagggcaagatcctcagcgtggatggcaacaagatcaccatcatgcccaagcatgaggacctcaaggacatgttggagttcccagcccaggaacttagaaaatacttcaagatgggggaccacgtgaaggtgattgctggccgattcgagggcgacacaggcctcattgtgcgggtggaggagaatttcgttatcctgttctctgacctcaccatgcatgagctgaaggtgctcccccgggacctgcagctctgctcagagacagcatcaggtgtggatgttgggggccagcatgaatggggcgagctggtgcagctggatccccagactgtgggtgtcatcgtgcgactagaacgggagaccttccaggtgctgaacatgtacgggaaggtggtgactgtcagacatcaggctgtgacccggaagaaggacaaccgctttgctgtggccttggactcagagcagaacaacatccatgtgaaagacatcgttaaggtcattgatggcccccactcaggccgagaaggggagattcgccatctcttccgaagcttcgccttcctacattgcaagaaactggtggagaacgggggcatgtttgtctgcaagacccgccacctggtgctggctgggggctcaaagccccgtgatgtgaccaacttcaccgtgggtggctttgcgcctatgagtccccggatcagcagccccatgcaccccagtgctggaggtcagcgtggcggctttggtagcccaggtggcggcagtggtggcatgagcaggggccggggccggagggacaacgaactcatcggccagaccgtgcgcatctcccaggggccctacaaaggctacatcggtgtggtgaaagatgccacagagtccacggcccgtgtggagctgcactccacctgccagaccatctctgtggaccgtcagcggctcaccacggtgggctcacggcgcccgggcggcatgacctcgacctatgggaggacgcccatgtatggctcccagacgcccatgtatggctctggctcccgaacacccatgtacggctcacagacacccctccaggatggtagccgcaccccacactacggctcacagacgcccctgcatgatggcagccgcactcctgcccagagtggggcctgggaccccaacaaccccaacacgccgtcacgggctgaggaagaatatgagtatgctttcgatgatgagcccaccccgtccccgcaggcctatgggggaacccccaatccccaaacacctggctacccagacccctcgtccccacaggtcaacccacaatacaacccgcagacgccagggacgccggccatgtacaacacagaccagttctctccctatgctgccccctccccacaaggttcctaccagcccagccccagcccccagagctaccaccaggtggcgccaagcccagcaggctaccagaatacccactccccagccagctaccaccctacaccgtcgcccatggcctatcaggctagccccagcccgagccccgttggctacagtcctatgacacctggagctccctcccctggtggctacaacccacacacgccaggctcaggcatcgagcagaactccagcgactgggtaaccactgacattcaggtgaaggtgcgggacacctacctggatacacaggtggtgggacagacaggtgtcatccgcagtgtcacggggggcatgtgctctgtgtacctgaaggacagtgagaaggttgtcagcatttccagtgagcacctggagcctatcacccccaccaagaacaacaaggtgaaagtgatcctgggcgaggatcgggaagccacgggcgtcctactgagcattgatggtgaggatggcattgtccgtatggaccttgatgagcagctcaagatcctcaacctccgcttcctggggaagctcctggaagcctgaagcaggcagggccggtggacttcgtcggatgaagagtgatcctccttccttccctggcccttggctgtgacacaagatcctcctgcagggctaggcggattgttctggatttccttttgtttttccttttagttttccatcttttccctccctggtgctcattggaatctgagtagagtctgggggagggtccccaccttcctgtacctcctccccacagcttgcttttgttgtaccgtctttcaataaaaagaagctgtttggtctaaaaaaaaaaaaaaaaaaaaaaaa

SEQ ID NO: 456 - protein, 1087 aa, Homo sapiens
MSDSEDSNFSEEEDSERSSDGEEAEVDEERRSAAGSEKEEEPEDEEEEEEEEEYDEEEEEEDDDRPPKKPRHGGFILDEADVDDEYEDEDQWEDGAEDILEKEEIEASNIDNVVLDEDRSGARRLQNLWRDQREEELGEYYMKKYAKSSVGETVYGGSDELSDDITQQQLLPGVKDPNLWTVKCKIGEERATAISLMRKFIAYQFTDTPLQIKSVVAPEHVKGYIYVEAYKQTHVKQAIEGVGNLRLGYWNQQMVPIKEMTDVLKVVKEVANLKPKSWVRLKRGIYKDDIAQVDYVEPSQNTISLKMIPRIDYDRIKARMSLKDWFAKRKKFKRPPQRLFDAEKIRSLGGDVASDGDFLIFEGNRYSRKGFLFKSFAMSAVITEGVKPTLSELEKFEDQPEGIDLEVVTESTGKEREHNFQPGDNVEVCEGELINLQGKILSVDGNKITIMPKHEDLKDMLEFPAQELRKYFKMGDHVKVIAGRFEGDTGLIVRVEENFVILFSDLTMHELKVLPRDLQLCSETASGVDVGGQHEWGELVQLDPQTVGVIVRLERETFQVLNMYGKVVTVRHQAVTRKKDNRFAVALDSEQNNIHVKDIVKVIDGPHSGREGEIRHLFRSFAFLHCKKLVENGGMFVCKTRHLVLAGGSKPRDVTNFTVGGFAPMSPRISSPMHPSAGGQRGGFGSPGGGSGGMSRGRGRRDNELIGQTVRISQGPYKGYIGVVKDATESTARVELHSTCQTISVDRQRLTTVGSRRPGGMTSTYGRTPMYGSQTPMYGSGSRTPMYGSQTPLQDGSRTPHYGSQTPLHDGSRTPAQSGAWDPNNPNTPSRAEEEYEYAFDDEPTPSPQAYGGTPNPQTPGYPDPSSPQVNPQYNPQTPGTPAMYNTDQFSPYAAPSPQGSYQPSPSPQSYHQVAPSPAGYQNTHSPASYHPTPSPMAYQASPSPSPVGYSPMTPGAPSPGGYNPHTPGSGIEQNSSDWVTTDIQVKVRDTYLDTQVVGQTGVIRSVTGGMCSVYLKDSEKVVSISSEHLEPITPTKNNKVKVILGEDREATGVLLSIDGEDGIVRMDLDEQLKILNLRFLGKLLEA

SEQ ID NO: 457 - DNA, 94 bp, Homo sapiens
tttcagcaactggcttgctactaccctcagcatattttatttgctcaagattgccaatttctccaactttatttttcttcacttaaagaggaga

SEQ ID NO: 458 - DNA, 1027 bp, Homo sapiens
tcagcgagaccacgaacccacctgcaggaaccaattccggacacaacaccagcatttaaaaaaattttttttgtctgttcagacatgataacttttctacccatcattttttccagtctggtagtggttacatttgttattggaaattttgctaatggcttcatagcactggtaaattccattgagtggttcaagagacaaaagatctcctttgctgaccaaattctcactgctctggcggtctccagagttggtttgctctgggtattattattaaactggtattcaactgtgttgaatccagcttttaatagtgtagaagtaagaactactgcttataatatctgggcagtgatcaaccatttcagcaactggcttgctactaccctcagcatattttatttgctcaagattgccaatttctccaactttatttttcttcacttaaagaggagagttaagagtgtcattctggtgatgttgttggggcctttgctatttttggcttgtcatctttttgtgataaacatgaatgagattgtgcggacaaaagaatttgaaggaaacatgacttggaagatcaaattgaagagtgcaatgtacttttcaaatatgactgtaaccatggtagcaaacttagtacccttcactctgaccctactatcttttatgctgttaatctgttctttgtgtaaacatctcaagaagatgcagctccatggtaaaggatctcaagatcccagcaccaaggtccacataaaagctttgcaaactgtgatctccttcctcttgttatgtgccatttactttctgtccataatgatatcagtttggagttttggaagtctggaaaacaaacctgtcttcatgttctgcaaagctattagattcagctatccttcaatccacccattcatcctgatttggggaaacaagaagctaaagcagacttttctttcagttttttggcaaatgaggtactgggtgaaaggagagaagacttcatctccatagattcacgagaggg

SEQ ID NO: 459 - protein, 309 aa, Homo sapiens
MITFLPIIFSSLVVVTFVIGNFANGFIALVNSIEWFKRQKISFADQILTALAVSRVGLLWVLLLNWYSTVLNPAFNSVEVRTTAYNIWAVINHFSNWLATTLSIFYLLKIANFSNFIFLHLKRRVKSVILVMLLGPLLFLACHLFVINMNEIVRTKEFEGNMTWKIKLKSAMYFSNMTVTMVANLVPFTLTLLSFMLLICSLCKHLKKMQLHGKGSQDPSTKVHIKALQTVISFLLLCAIYFLSIMISVWSFGSLENKPVFMFCKAIRFSYPSIHPFILIWGNKKLKQTFLSVFWQMRYWVKGEKTSSP

SEQ ID NO: 460 - DNA, 108 bp, Homo sapiens
ccaagaagaaagtgaacatcatggatcagaacaacagcctgccaccttacgctcagggcttggcctcccctcagggtgccatgactcccggaatccctatctttagtc

SEQ ID NO: 461 - DNA, 1857 bp, Homo sapiens
agtgaggtcgggcaggttcgctgtggcgggcgcctgggccgccggctgtttaacttcgcttccgctggcccatagtgatctttgcagtgacccagcatcactgtttcttggcgtgtgaagataacccaaggaattgaggaagttgctgagaagagtgtgctggagatgctctaggaaaaaattgaatagtgagacgagttccagcgcaagggtttctggtttgccaagaagaaagtgaacatcatggatcagaacaacagcctgccaccttacgctcagggcttggcctcccctcagggtgccatgactcccggaatccctatctttagtccaatgatgccttatggcactggactgaccccacagcctattcagaacaccaatagtctgtctattttggaagagcaacaaaggcagcagcagcaacaacaacagcagcagcagcagcagcagcagcaacagcaacagcagcagcagcagcagcagcagcagcagcagcagcagcagcagcagcagcagcagcaacaggcagtggcagctgcagccgttcagcagtcaacgtcccagcaggcaacacagggaacctcaggccaggcaccacagctcttccactcacagactctcacaactgcacccttgccgggcaccactccactgtatccctcccccatgactcccatgacccccatcactcctgccacgccagcttcggagagttctgggattgtaccgcagctgcaaaatattgtatccacagtgaatcttggttgtaaacttgacctaaagaccattgcacttcgtgcccgaaacgccgaatataatcccaagcggtttgctgcggtaatcatgaggataagagagccacgaaccacggcactgattttcagttctgggaaaatggtgtgcacaggagccaagagtgaagaacagtccagactggcagcaagaaaatatgctagagttgtacagaagttgggttttccagctaagttcttggacttcaagattcagaatatggtggggagctgtgatgtgaagtttcctataaggttagaaggccttgtgctcacccaccaacaatttagtagttatgagccagagttatttcctggtttaatctacagaatgatcaaacccagaattgttctccttatttttgtttctggaaaagttgtattaacaggtgctaaagtcagagcagaaatttatgaagcatttgaaaacatctaccctattctaaagggattcaggaagacgacgtaatggctctcatgtacccttgcctcccccacccccttctttttttttttttaaacaaatcagtttgttttggtacctttaaatggtggtgttgtgagaagatggatgttgagttgcagggtgtggcaccaggtgatgcccttctgtaagtgcccaccgcgggatgccgggaaggggcattatttgtgcactgagaacaccgcgcagcgtgactgtgagttgctcataccgtgctgctatctgggcagcgctgcccatttatttatatgtagattttaaacactgctgttgacaagttggtttgagggagaaaactttaagtgttaaagccacctctataattgattggactttttaattttaatgtttttccccatgaaccacagtttttatatttctaccagaaaagtaaaaatcttttttaaaagtgttgtttttctaatttataactcctaggggttatttctgtgccagacacattccacctctccagtattgcaggacagaatatatgtgttaatgaaaatgaatggctgtacatatttttttctttcttcagagtactctgtacaataaatgcagtttataaaagtgtta

SEQ ID NO: 462 - protein, 339 aa, Homo sapiens
MDQNNSLPPYAQGLASPQGAMTPGIPIFSPMMPYGTGLTPQPIQNTNSLSILEEQQRQQQQQQQQQQQQQQQQQQQQQQQQQQQQQQQQQQQQQQAVAAAAVQQSTSQQATQGTSGQAPQLFHSQTLTTAPLPGTTPLYPSPMTPMTPITPATPASESSGIVPQLQNIVSTVNLGCKLDLKTIALRARNAEYNPKRFAAVIMRIREPRTTALIFSSGKMVCTGAKSEEQSRLAARKYARVVQKLGFPAKFLDFKIQNMVGSCDVKFPIRLEGLVLTHQQFSSYEPELFPGLIYRMIKPRIVLLIFVSGKVVLTGAKVRAEIYEAFENIYPILKGFRKTT

SEQ ID NO: 463 - DNA, 107 bp, Homo sapiens
ctgagatgttgcgttgtccattaggaagcacgatcttgaaagtgaaattacttgacatgggtgagccgagagctctgctggccactgccctttccccgcctggtctg

SEQ ID NO: 464 - DNA, 4788 bp, Homo sapiens
gttcccgccgcggagacccggcagttgggggatgccgacgcctgggccttgaggatgctgcggaagctcaccatcgagcagatcaacgactggttcaccatcggcaagacggtgaccaatgtggagctgctgggcgcgccgcccgccttcccggcaggggcggccagggaggaggtgcagcgccaggacgtggcccccggcgctggtcccgcggcccaggctccggctctggcccaagctccggcccggccggccgctgcgttcgaaaggtcactcagccaaaggagctcagaagtagagtatattaacaaatacagacagctcgaagcacaagagcttgatgtgtgtcgcagtgtccaaccaaccagtgggccaggtccaaggccatctttggctaaattaagcagtgtgacatgcatcccagggacaacttataaatatcctgatttgcctataagtcgatacaaggaagaggttgtgtctttgatagaaagtaattccgtggtgattatccatggggccacgggaagcggtaaaagcactcagctcccgcagtatatcttggaccactacgttcagcgctccgcctactgcagcattgtggtcacccagccccggaagataggggcaagcagcatcgccaggtggatcagtaaagagcgtgcctggaccctgggaggtgtggtgggctaccaggtagggctagagaaaatagcaacagaggacaccaggctaatttatatgacaactggagtcctgcttcagaaaatagttagtgccaagagtttgatggaattcacacatatcatcattgatgaagtacacgaacgaacagaagaaatggatttcctgctattggtagtccgcaaactcttaagaacaaattcacgttttgtgaaggtggtcctgatgtcggctaccatcagctgtaaagagtttgcagactactttgctgttcctgttcaaaacaagatgaatcctgcatatatttttgaagtggaaggcaagccccattcagttgaagagtattatcttaatgatttggagcacattcatcatagcaagctctctcctcatctcctggaggaaccggtgataactaaggatatatatgaagttgctgtctctctcattcagatgtttgatgacttggatatgaaggagagtgggaacaaggcttggtcgggggcccagtttgtgttggagcgaagcagtgtgttggtgtttttgccaggtctgggtgaaataaattatatgcatgaacttctcacaagcctggttcataaaaggttgcaggtctatccactccattcaagtgtggctttagaagaacagaataatgtctttttaagtccagtccctgggtacagaaagattattctgtccaccaatattgcagagagttctgtcacagttccagatgtcaaatatgttatagatttttgtttgactagaactttggtctgtgatgaagatacaaattatcagagtctgcgattgagttgggcttctaaaaccagctgtaatcagagaaaaggccgtgctggacgagtgtctagagggtactgttaccggctggtacacaaggatttctgggacaactccatccctgatcatgttgttcctgagatgttgcgttgtccattaggaagcacgatcttgaaagtgaaattacttgacatgggtgagccgagagctctgctggccactgccctttccccgcctggtctgagtgacattgagcgcaccatccttctactaaaggaggttggagcacttgcagtgagtgggcagagagaagatgaaaacccccatgatggtgaattgaccttcttaggaagagttttagcccaacttcctgtaaatcagcaacttggtaaactcatagtccttggacatgtatttggatgtctagatgaatgtcttattatagcggcagctctttctttgaagaatttttttgcaatgcctttccggcagcatctcgatggatataggaacaaagtgaatttctctggcagtagcaagagtgactgtattgcacttgttgaggcatttaaaacatggaaggcttgcagacagacaggggagctgcggtacccgaaggatgaacttaattggggacggttaaattacattcaaatcaagagaattagagaggtggctgaattatatgaagaattgaagactagaatctcacagttcaacatgcatgttgattctcggcgacctgtcatggaccaagagtatatatataagcagcgattcatcctacaggttgtattggcaggtgctttctatccaaattactttacttttggacagccggatgaggagatggcggtgagggagctggctggcaaggaccccaagacaactgtcgtgttgaaacacattcctccctatggatttctttactataaacaactacagtctctctttagacagtgtggtcaagtcaaatccattgtatttgatggtgcaaaagcctttgtggaattctcacgaaatccaacagagagatttaaaacccttcctgcagtatatatggcaattaagatgtctcaactaaaagtttcacttgaactcagcgttcattctgcagaggaaattgaagggaaggtgcaaggcatgaacgtctcaaagctcaggaacacaagggtgaatgtggacttccagaagcagacggtagatcctatgcaagtctcctttaacacatcagacaggtcccagacagttacagatctccttctaactattgatgtcacagaggtggttgaagtgggacacttttggggatacaggattgatgaaaacaactcagagattctgaaaaagcttactgctgaaatcaaccaactgacgctggtgcccttgcccactcacccacatccagacttggtctgtctggcaccttttgctgattttgataaacaacgctactttagagctcaagtcctttatgtttctggaaattctgctgaggtattctttgtagattatggcaataagtctcatgtagatctacatcttttgatggagattccctgtcaatttcttgaacttcctttccaggctttggaatttaagatttgcaaaatgagaccatcagcaaagtctcttgtttgtggcaagcactggagtgacggggccagccagtggttcgcctctctggtgagcggctgcaccctccttgtgaaggtcttctctgtggtgcacagcgtcctgcacgtggatgtgtaccagtactcaggggtccaggatgccatcaacataagagacgtcctcatccagcagggctatgccgagctcacggaggagtcctacgagtccaagcaaagccatgaagttctcaagggcctcttttccaagtcagtagaaaacatgacagatggctctgtgccctttcccatgaaagacgacgagaaatatctcatccggattttgttagagagcttttctaccaataaactgggtactccaaactgtaaggcagaacttcacgggccttttaacccttatgaactaaagtgccatagtttgaccagaatatccaaattcaggtgtgtttggattgagaaggagagcatcaactctgtcattatcagtgacgcccctgaagaccttcaccagagaatgctggttgcagcttccctttccatcaatgcgactggatctacgatgctgctgagagaaacctctctgatgcctcatatccctggcctcccggctctcctcagcatgttattcgcaccggtgatagagttaaggattgatcagaatggcaagtactatactggagtcctttgtggtttggggtggaatccagctacaggggcttccatactgcccgagcacgacatggagcttgcgtttgacgttcaattcagcgtggaggatgtcgtcgaggttaatattctcagggctgctattaacaagctagtctgtgatggaccaaatggatgcaagtgtcttgggccagagagagttgcgcagcttcaagacattgcccgtcagaagcttttaggtttgttctgtcagtcaaaaccaagggagaagattgttcccaagtggcatgaaaagccctacgagtggaatcaggttgatccaaagctggtcatggagcaggccgaccgtgagagcagcagagggaagaacacctttctctaccagctccacaaactggttgtgctcggcacctgagcatgtccacaggtggcctccagcacacccctcaggaagctgtggaggctggattccaggctccctccgcagactgactttcctctgtgtctgggtgttacagtctgtgcccactgcatcctaaaggccttttctttcttcttttctctttgggtgatagtcagagagtggtgtttttgttcaggtgggaaggattggaaactctagtcttttctagaaacagaaaatcactgtattaaatattttggaaagattgttctgaaagaagtctgtttggataaagagctgtattttgctttaaatttattaaggtaaatataagtagttaatcttagatgtaaggttccagaatgtgcttacatattctgttctgttacagtgatttaaaccagtagtataggaaaaaacttaaaaaaacaaaaaaaccatgtagtattttctgatttttttttccatgagggaaaatatctaatttttataagactaagttgagttatacttcttggttcacattttggaaatcagagattacagattacatggccatagcttatctgtgttaaaacaataaaagcattaaatgaa

SEQ ID NO: 465 - protein, 1382 aa, Homo sapiens
MLRKLTIEQINDWFTIGKTVTNVELLGAPPAFPAGAAREEVQRQDVAPGAGPAAQAPALAQAPARPAAAFERSLSQRSSEVEYINKYRQLEAQELDVCRSVQPTSGPGPRPSLAKLSSVTCIPGTTYKYPDLPISRYKEEVVSLIESNSVVIIHGATGSGKSTQLPQYILDHYVQRSAYCSIVVTQPRKIGASSIARWISKERAWTLGGVVGYQVGLEKIATEDTRLIYMTTGVLLQKIVSAKSLMEFTHIIIDEVHERTEEMDFLLLVVRKLLRTNSRFVKVVLMSATISCKEFADYFAVPVQNKMNPAYIFEVEGKPHSVEEYYLNDLEHIHHSKLSPHLLEEPVITKDIYEVAVSLIQMFDDLDMKESGNKAWSGAQFVLERSSVLVFLPGLGEINYMHELLTSLVHKRLQVYPLHSSVALEEQNNVFLSPVPGYRKIILSTNIAESSVTVPDVKYVIDFCLTRTLVCDEDTNYQSLRLSWASKTSCNQRKGRAGRVSRGYCYRLVHKDFWDNSIPDHVVPEMLRCPLGSTILKVKLLDMGEPRALLATALSPPGLSDIERTILLLKEVGALAVSGQREDENPHDGELTFLGRVLAQLPVNQQLGKLIVLGHVFGCLDECLIIAAALSLKNFFAMPFRQHLDGYRNKVNFSGSSKSDCIALVEAFKTWKACRQTGELRYPKDELNWGRLNYIQIKRIREVAELYEELKTRISQFNMHVDSRRPVMDQEYIYKQRFILQVVLAGAFYPNYFTFGQPDEEMAVRELAGKDPKTTVVLKHIPPYGFLYYKQLQSLFRQCGQVKSIVFDGAKAFVEFSRNPTERFKTLPAVYMAIKMSQLKVSLELSVHSAEEIEGKVQGMNVSKLRNTRVNVDFQKQTVDPMQVSFNTSDRSQTVTDLLLTIDVTEVVEVGHFWGYRIDENNSEILKKLTAEINQLTLVPLPTHPHPDLVCLAPFADFDKQRYFRAQVLYVSGNSAEVFFVDYGNKSHVDLHLLMEIPCQFLELPFQALEFKICKMRPSAKSLVCGKHWSDGASQWFASLVSGCTLLVKVFSVVHSVLHVDVYQYSGVQDAINIRDVLIQQGYAELTEESYESKQSHEVLKGLFSKSVENMTDGSVPFPMKDDEKYLIRILLESFSTNKLGTPNCKAELHGPFNPYELKCHSLTRISKFRCVWIEKESINSVIISDAPEDLHQRMLVAASLSINATGSTMLLRETSLMPHIPGLPALLSMLFAPVIELRIDQNGKYYTGVLCGLGWNPATGASILPEHDMELAFDVQFSVEDVVEVNILRAAINKLVCDGPNGCKCLGPERVAQLQDIARQKLLGLFCQSKPREKIVPKWHEKPYEWNQVDPKLVMEQADRESSRGKNTFLYQLHKLVVLGT

SEQ ID NO: 466 - DNA, 106 bp, Homo sapiens
acaatggctatagtccaataacttcatacacaatggctcctgtggctaatagatttcatcttcggcttgaaaataatgcagaggagatgggagatgaggaagtcca

SEQ ID NO: 467 - DNA, 6339 bp, Homo sapiens
aatcgagggtttcggggacgccgagcggcactttcctcttcccagcgagtgaaggagggcagtcggcggctctcgcgccccggccactttccctgcgcgattcccggagctccctgcaggaggtgagagtccccagcgggtccggatggcgtagttttgccgcggcgcagcagctgccggagctcgccgccgccgagcgctgggcggggaaacttgccgccgctttcctccaacttgctgcgggtggatctccgctggacacaccgcctccgaggcagtttgaaaattgcaaggagggactttaagactacttctgatttgcaaagattgtctgtgctctgagcaggctgaagtgactggacgagacgcactgttggagaaataaaaatgacttcccattatgtgattgccatctttgccctgatgagctcctgtttagccactgcaggtccagagcctggtgcactgtgtgaactgtcacctgtcagtgcctcccatcctgtccaggccttgatggagagcttcactgttttgtcaggctgtgccagcagaggcacaactgggctgccacaggaggtgcatgtcctgaatctccgcactgcaggccaggggcctggccagctacagagagaggtcacacttcacctgaatcccatctcctcagtccacatccaccacaagtctgttgtgttcctgctcaactccccacaccccctggtgtggcatctgaagacagagagacttgccactggggtctccagactgtttttggtgtctgagggttctgtggtccagttttcatcagcaaacttctccttgacagcagaaacagaagaaaggaacttcccccatggaaatgaacatctgttaaattgggcccgaaaagagtatggagcagttacttcattcaccgaactcaagatagcaagaaacatttatattaaagtgggggaagatcaagtgttccctccaaagtgcaacatagggaagaattttctctcactcaattaccttgctgagtaccttcaacccaaagcagcagaagggtgtgtgatgtccagccagccccagaatgaggaagtacacatcatcgagctaatcacccccaactctaacccctacagtgctttccaggtggatataacaattgatataagaccttctcaagaggatcttgaagtggtcaaaaatctcatcctgatcttgaagtgcaaaaagtctgtcaactgggtgatcaaatcttttgatgttaagggaagcctgaaaattattgctcctaacagtattggctttggaaaagagagtgaaagatctatgacaatgaccaaatcaataagagatgacattccttcaacccaagggaatctggtgaagtgggctttggacaatggctatagtccaataacttcatacacaatggctcctgtggctaatagatttcatcttcggcttgaaaataatgcagaggagatgggagatgaggaagtccacactattcctcctgagctacggatcctgctggaccctggtgccctgcctgccctgcagaacccgcccatccggggaggggaaggccaaaatggaggccttccgtttcctttcccagatatttccaggagagtctggaatgaagagggagaagatgggctccctcggccaaaggaccctgtcattcccagcatacaactgtttcctggtctcagagagccagaagaggtgcaagggagcgtggatattgccctgtctgtcaaatgtgacaatgagaagatgatcgtggctgtagaaaaagattcttttcaggccagtggctactcggggatggacgtcaccctgttggatcctacctgcaaggccaagatgaatggcacacactttgttttggagtctcctctgaatggctgcggtactcggccccggtggtcagcccttgatggtgtggtctactataactccattgtgatacaggttccagcccttggggacagtagtggttggccagatggttatgaagatctggagtcaggtgataatggatttccgggagatatggatgaaggagatgcttccctgttcacccgacctgaaatcgtggtgtttaattgcagccttcagcaggtgaggaaccccagcagcttccaggaacagccccacggaaacatcaccttcaacatggagctatacaacactgacctctttttggtgccctcccagggcgtcttctctgtgccagagaatggacacgtttatgttgaggtatctgttactaaggctgaacaagaactgggatttgccatccaaacgtgctttatctctccatattcgaaccctgataggatgtctcattacaccattattgagaatatttgtcctaaagatgaatctgtgaaattctacagtcccaagagagtgcactttcctatcccgcaagctgacatggataagaagcgattcagctttgtcttcaagcctgtcttcaacacctcactgctctttctacagtgtgagctgacgctgtgtacgaagatggagaagcacccccagaagttgcctaagtgtgtgcctcctgacgaagcctgcacctcgctggacgcctcgataatctgggccatgatgcagaataagaagacgttcactaagccccttgctgtgatccaccatgaagcagaatctaaagaaaaaggtccaagcatgaaggaaccaaatccaatttctccaccaattttccatggtctggacaccctaaccgtgatgggcattgcgtttgcagcctttgtgatcggagcactcctgacgggggccttgtggtacatctattctcacacaggggagacagcaggaaggcagcaagtccccacctccccgccagcctcggaaaacagcagtgctgcccacagcatcggcagcacgcagagcacgccttgctccagcagcagcacggcctagcccaacccagcccaacccggcccaacccagcccagcccagctcagctcagctactgccaagggcaggaccaatggctgagcctcgtgtccagactcagagggctggattttggttcccttgtaaagacagagtgaatttcagtataaagatcacccgttgtattcaccccacacccagggctagtataaacatgaccctgggcttctgtaccacactagaattcatgtgagaaagctaaaatggtggtcttctccaccagcccctcacaggcttgggggttttcaatgtgaaacacatgccagtttttaaaatgctgctttgtccaggtgagaacatccataatttggggccctgagttttacccagactcaaggagttggtaaagggttaatagccagatagtagaaccagtgaggagatgcggccaaagattctttatatctgaaccaagatgtaaaacaagaaatgctttgaggctttctaagcgatcctcctgtctaatttgcacctttgtctggatgcacacttctgaccttgctgccacaacctgtggggtctgatgtgtcccttgatgggtgctgccctcagggactgcaccctgacaagtgttaaggcaacattcctttcttgtgccctgggccaaaaccaatgctgatgaccttatcagcttcctgtttcttcccatacttgcatacaccactgcaaaatgtcttaatgcaaattttgtatttcttacaggcctacagaaattgaaaatgaccaaaatcaggaaccacagatttgtgcccattcctaatattttgttctgcaaattaatgtataatttgaggtgaaattcagttataaagtcaaggacgaatttgcacagtgatatatttctatgtgtatgcaagtacaagtatataatatgtcacctggcacattcattttctcagttgaagaagagaaaatttgaaaatgtccttatgcttttagagttgcaacttaagtatatttggtagggtgagtgtttccactcaaaatatgtcaacttaaaaaaaaataggccctttcataaaaaccaaactgtagcaagatgcaaatgcatggcaaatcctgtcggtctccagttggttatctgaatagtgtcaccaattccaccaagacagtgctgagattggaaaagggcactcatttggattgccttacttctcttgccttaaatatatcccatatatttaatatgtcaaaaagggcttgaggtgaatttcattaaatggaataatatgatgccactttgcagctaaaataagctcagtgatacctccttgttaaaaaaaaaaaaaaaaaaaaagaatgccaggggggaattatcatgctaaattattttactgctgaagatagcttcattgcaaattattctttttccagaatttcccccaaacaacttagaattccataagtagaacaagatagattctacccccaaaatattcataagcaaatcccactgcccttaaaataaggaagttatgcctggttgtctgtgaatggaacctcagtaggtaatcctgatgaagcttaaaaccttagggcagtgtctacatgggaaacaagtatgtggaaattgacaatcatttttaccaaatcgttgagtaataatatgacttacctgatagatatacacattcaataaggaacatttttttttttcaataaggaacattttaactaaaacattactttagggctgagatttccaggctatctacattgatctactgaaaaatttctagatttccatatacaaacgaagaagacatgagtttagagaatttttttcctttaatttttttttaacagaagggtatcagagtggaggacctagattacgctacctgtgtttgaaaatattgcgctttgcctaaccttcggtggaatgtattgtttcagcatattctatgtataaaaaagtttaaagatgtcttcaaagaagactagagtctttaagtcacttatagctatattttactacaaaatttgtgtataaagatatatttaagtgttttagataaatttaagttactccatatgaaatgtttaatttcagctactgtgaattctttcgatcagtcctttgcttttttaaaaaatcttttccatcgtgttaaaaagaaaattagctattaggagatattaaaagattgatgtcttagaaggacagggttaaaaccttctgtaatatatttaaatatatatttttaagagagatgctacattgccaatgattttataaataatttaaaattaatttacaaatttatagatgcaaaccaaaagatctttttaaaagagagagagaggaaaaaaatcaccttttatttgtttgggtctcattgtcagaattattattcagatcaagaaatctgtgtcgataaaacctaatctcatattggagagtgaatgtcgttaagtatttctgaaatgtttctaaaaaatgaacatgaaaaaaataaggtattttctccctagcttctcattacagtatttctaattgcttcacactttacagttttaatacaaagtacaagctctacttttataacgtgtactacaagtttctttaaaagtattgttgtatttcagctgaactcttgtatctgcagtcttttgttatttctgcaggctacacccttaatttgcagaggccattttgttgtttgtttgatgctgaagctgttgttaaaatgccccaaactccaaggcagattgtctgtataatacgctatagcttttcaccatgtggtgtttaccagctgttactctgtattttaaaaagccagagatttcttctgtctaaactgtttctatagcattttctaaacaaaaaaaatggtttttttctttgccttgtaataagattgtaaatccatttcctgcttgtgttcttagtgggcatgattgtgagtgtgtgtggggtgctcacacgcgtgccagtctttttgtactgtaactacctcatggtttgaatgatgattgtactgctggttgtgttaacagagcacattttgttgggtgagtcctatgtgatttttttcatgtttgttttatctgggggttgttcatgaaactgacagatgtttttctaaaaaggactattatcagtttccaaatacaatacttctctcttctggtttttcctgaatgagcctgattttgttgctggttttcatcatctatgagggtaaaacgagtacccttaaaatccctgtggccagtttgaacacccctgttgtattcttttctctgttcagtgtgtcagctattttgtgaagatgcttagatgtatagttttgataaccacagttttaaatcttttatctgtgcataataaaaagatatatatcagttattaa

SEQ ID NO: 468 - protein, 851 aa, Homo sapiens
MTSHYVIAIFALMSSCLATAGPEPGALCELSPVSASHPVQALMESFTVLSGCASRGTTGLPQEVHVLNLRTAGQGPGQLQREVTLHLNPISSVHIHHKSVVFLLNSPHPLVWHLKTERLATGVSRLFLVSEGSVVQFSSANFSLTAETEERNFPHGNEHLLNWARKEYGAVTSFTELKIARNIYIKVGEDQVFPPKCNIGKNFLSLNYLAEYLQPKAAEGCVMSSQPQNEEVHIIELITPNSNPYSAFQVDITIDIRPSQEDLEVVKNLILILKCKKSVNWVIKSFDVKGSLKIIAPNSIGFGKESERSMTMTKSIRDDIPSTQGNLVKWALDNGYSPITSYTMAPVANRFHLRLENNAEEMGDEEVHTIPPELRILLDPGALPALQNPPIRGGEGQNGGLPFPFPDISRRVWNEEGEDGLPRPKDPVIPSIQLFPGLREPEEVQGSVDIALSVKCDNEKMIVAVEKDSFQASGYSGMDVTLLDPTCKAKMNGTHFVLESPLNGCGTRPRWSALDGVVYYNSIVIQVPALGDSSGWPDGYEDLESGDNGFPGDMDEGDASLFTRPEIVVFNCSLQQVRNPSSFQEQPHGNITFNMELYNTDLFLVPSQGVFSVPENGHVYVEVSVTKAEQELGFAIQTCFISPYSNPDRMSHYTIIENICPKDESVKFYSPKRVHFPIPQADMDKKRFSFVFKPVFNTSLLFLQCELTLCTKMEKHPQKLPKCVPPDEACTSLDASIIWAMMQNKKTFTKPLAVIHHEAESKEKGPSMKEPNPISPPIFHGLDTLTVMGIAFAAFVIGALLTGALWYIYSHTGETAGRQQVPTSPPASENSSAAHSIGSTQSTPCSSSSTA

SEQ ID NO: 469 - DNA, 105 bp, Homo sapiens
ccgatgtgagggctcctcggtccagacacggacctgccacattcaggagtgtgacaagagatttaaacaggatggtggctggagccactggtccccgtggtcatc

SEQ ID NO: 470 - DNA, 7789 bp, Homo sapiens
agccgctgcgcccgagctggcctgcgagttcagggctcctgtcgctctccaggagcaacctctactccggacgcacaggcattccccgcgcccctccagccctcgccgccctcgccaccgctcccggccgccgcgctccggtacacacaggatccctgctgggcaccaacagctccaccatggggctggcctggggactaggcgtcctgttcctgatgcatgtgtgtggcaccaaccgcattccagagtctggcggagacaacagcgtgtttgacatctttgaactcaccggggccgcccgcaaggggtctgggcgccgactggtgaagggccccgacccttccagcccagctttccgcatcgaggatgccaacctgatcccccctgtgcctgatgacaagttccaagacctggtggatgctgtgcgggcagaaaagggtttcctccttctggcatccctgaggcagatgaagaagacccggggcacgctgctggccctggagcggaaagaccactctggccaggtcttcagcgtggtgtccaatggcaaggcgggcaccctggacctcagcctgaccgtccaaggaaagcagcacgtggtgtctgtggaagaagctctcctggcaaccggccagtggaagagcatcaccctgtttgtgcaggaagacagggcccagctgtacatcgactgtgaaaagatggagaatgctgagttggacgtccccatccaaagcgtcttcaccagagacctggccagcatcgccagactccgcatcgcaaaggggggcgtcaatgacaatttccagggggtgctgcagaatgtgaggtttgtctttggaaccacaccagaagacatcctcaggaacaaaggctgctccagctctaccagtgtcctcctcacccttgacaacaacgtggtgaatggttccagccctgccatccgcactaactacattggccacaagacaaaggacttgcaagccatctgcggcatctcctgtgatgagctgtccagcatggtcctggaactcaggggcctgcgcaccattgtgaccacgctgcaggacagcatccgcaaagtgactgaagagaacaaagagttggccaatgagctgaggcggcctcccctatgctatcacaacggagttcagtacagaaataacgaggaatggactgttgatagctgcactgagtgtcactgtcagaactcagttaccatctgcaaaaaggtgtcctgccccatcatgccctgctccaatgccacagttcctgatggagaatgctgtcctcgctgttggcccagcgactctgcggacgatggctggtctccatggtccgagtggacctcctgttctacgagctgtggcaatggaattcagcagcgcggccgctcctgcgatagcctcaacaaccgatgtgagggctcctcggtccagacacggacctgccacattcaggagtgtgacaagagatttaaacaggatggtggctggagccactggtccccgtggtcatcttgttctgtgacatgtggtgatggtgtgatcacaaggatccggctctgcaactctcccagcccccagatgaacgggaaaccctgtgaaggcgaagcgcgggagaccaaagcctgcaagaaagacgcctgccccatcaatggaggctggggtccttggtcaccatgggacatctgttctgtcacctgtggaggaggggtacagaaacgtagtcgtctctgcaacaaccccacaccccagtttggaggcaaggactgcgttggtgatgtaacagaaaaccagatctgcaacaagcaggactgtccaattgatggatgcctgtccaatccctgctttgccggcgtgaagtgtactagctaccctgatggcagctggaaatgtggtgcttgtccccctggttacagtggaaatggcatccagtgcacagatgttgatgagtgcaaagaagtgcctgatgcctgcttcaaccacaatggagagcaccggtgtgagaacacggaccccggctacaactgcctgccctgccccccacgcttcaccggctcacagcccttcggccagggtgtcgaacatgccacggccaacaaacaggtgtgcaagccccgtaacccctgcacggatgggacccacgactgcaacaagaacgccaagtgcaactacctgggccactatagcgaccccatgtaccgctgcgagtgcaagcctggctacgctggcaatggcatcatctgcggggaggacacagacctggatggctggcccaatgagaacctggtgtgcgtggccaatgcgacttaccactgcaaaaaggataattgccccaaccttcccaactcagggcaggaagactatgacaaggatggaattggtgatgcctgtgatgatgacgatgacaatgataaaattccagatgacagggacaactgtccattccattacaacccagctcagtatgactatgacagagatgatgtgggagaccgctgtgacaactgtccctacaaccacaacccagatcaggcagacacagacaacaatggggaaggagacgcctgtgctgcagacattgatggagacggtatcctcaatgaacgggacaactgccagtacgtctacaatgtggaccagagagacactgatatggatggggttggagatcagtgtgacaattgccccttggaacacaatccggatcagctggactctgactcagaccgcattggagatacctgtgacaacaatcaggatattgatgaagatggccaccagaacaatctggacaactgtccctatgtgcccaatgccaaccaggctgaccatgacaaagatggcaagggagatgcctgtgaccacgatgatgacaacgatggcattcctgatgacaaggacaactgcagactcgtgcccaatcccgaccagaaggactctgacggcgatggtcgaggtgatgcctgcaaagatgattttgaccatgacagtgtgccagacatcgatgacatctgtcctgagaatgttgacatcagtgagaccgatttccgccgattccagatgattcctctggaccccaaagggacatcccaaaatgaccctaactgggttgtacgccatcagggtaaagaactcgtccagactgtcaactgtgatcctggactcgctgtaggttatgatgagtttaatgctgtggacttcagtggcaccttcttcatcaacaccgaaagggacgatgactatgctggatttgtctttggctaccagtccagcagccgcttttatgttgtgatgtggaagcaagtcacccagtcctactgggacaccaaccccacgagggctcagggatactcgggcctttctgtgaaagttgtaaactccaccacagggcctggcgagcacctgcggaacgccctgtggcacacaggaaacacccctggccaggtgcgcaccctgtggcatgaccctcgtcacataggctggaaagatttcaccgcctacagatggcgtctcagccacaggccaaagacgggtttcattagagtggtgatgtatgaagggaagaaaatcatggctgactcaggacccatctatgataaaacctatgctggtggtagactagggttgtttgtcttctctcaagaaatggtgttcttctctgacctgaaatacgaatgtagagatccctaatcatcaaattgttgattgaaagactgatcataaaccaatgctggtattgcaccttctggaactatgggcttgagaaaacccccaggatcacttctccttggcttccttcttttctgtgcttgcatcagtgtggactcctagaacgtgcgacctgcctcaagaaaatgcagttttcaaaaacagactcagcattcagcctccaatgaataagacatcttccaagcatataaacaattgctttggtttccttttgaaaaagcatctacttgcttcagttgggaaggtgcccattccactctgcctttgtcacagagcagggtgctattgtgaggccatctctgagcagtggactcaaaagcattttcaggcatgtcagagaagggaggactcactagaattagcaaacaaaaccaccctgacatcctccttcaggaacacggggagcagaggccaaagcactaaggggagggcgcatacccgagacgattgtatgaagaaaatatggaggaactgttacatgttcggtactaagtcattttcaggggattgaaagactattgctggatttcatgatgctgactggcgttagctgattaacccatgtaaataggcacttaaatagaagcaggaaagggagacaaagactggcttctggacttcctccctgatccccacccttactcatcacctgcagtggccagaattagggaatcagaatcaaaccagtgtaaggcagtgctggctgccattgcctggtcacattgaaattggtggcttcattctagatgtagcttgtgcagatgtagcaggaaaataggaaaacctaccatctcagtgagcaccagctgcctcccaaaggaggggcagccgtgcttatatttttatggttacaatggcacaaaattattatcaacctaactaaaacattccttttctcttttttcctgaattatcatggagttttctaattctctcttttggaatgtagattttttttaaatgctttacgatgtaaaatatttattttttacttattctggaagatctggctgaaggattattcatggaacaggaagaagcgtaaagactatccatgtcatctttgttgagagtcttcgtgactgtaagattgtaaatacagattatttattaactctgttctgcctggaaatttaggcttcatacggaaagtgtttgagagcaagtagttgacatttatcagcaaatctcttgcaagaacagcacaaggaaaatcagtctaataagctgctctgccccttgtgctcagagtggatgttatgggattctttttttctctgttttatcttttcaagtggaattagttggttatccatttgcaaatgttttaaattgcaaagaaagccatgaggtcttcaatactgttttaccccatcccttgtgcatatttccagggagaaggaaagcatatacacttttttctttcatttttccaaaagagaaaaaaatgacaaaaggtgaaacttacatacaaatattacctcatttgttgtgtgactgagtaaagaatttttggatcaagcggaaagagtttaagtgtctaacaaacttaaagctactgtagtacctaaaaagtcagtgttgtacatagcataaaaactctgcagagaagtattcccaataaggaaatagcattgaaatgttaaatacaatttctgaaagttatgttttttttctatcatctggtataccattgctttatttttataaattattttctcattgccattggaatagatatctcagattgtgtagatatgctatttaaataatttatcaggaaatactgcctgtagagttagtatttctatttttatataatgtttgcacactgaattgaagaattgttggttttttcttttttttgttttgtttttttttttttttttttttgcttttgacctcccatttttactatttgccaatacctttttctaggaatgtgcttttttttgtacacatttttatccattttacattctaaagcagtgtaagttgtatattactgtttcttatgtacaaggaacaacaataaatcatatggaaatttatatttatacttactgtatccatgcttatttgttctctactggctttatgtcatgaagtatatgcgtaaataccattcataaatcaatatagcatatacaaaaataaattacagtaagtcatagcaacattcacagtttgtatgtgattgagaaagactgagttgctcaggcctaggcttagaatttgctgcgtttgtggaataaaagaacaaaatgatacattagcctgccatatcaaaaacatataaaagagaaattatccctaagtcaagggcccccataagaataaaatttcttattaaggtcattagatgtcattgaatccttttcaaagtgcagtatgaaaacaaagggaaaaacactgaagcacacgcaactctcacagcgacattttctgacccacgaatgatgccttgggtgggcaacacgattgcatgttgtggagacacttcggaagtaaatgtggatgagggaggagctgtccttgcaatgttgagccaagcattacagatacctcctcttgaagaaggaataataagtttaatcaaaaaagaagactaaaaaatgtaaaatttggaaggaatccataaatgcgtgtgtgtctaaatacaaattatcatgtgaagaaaaggcccaagtgtaccaataagcagaccttgatttttggatgggctaattatgaatgtggaatactgaccagttaatttccagttttaatgaaaacagatcaaagaagaaattttatgagtaggttaaaggtctggctttgaggtctattaaacactagaaaggactggctgggtgagataaaatcttccttgttgattttcactctcattctataaatactcatctttctgagtagccatgatcacatacaaatgtaaattgccaaatcattttatagtaccaaggtgaagaagcaggaactagaaagtgttgataatagctgtggagttaggaaaactgatgtgaaggaaataattctttgaaatggcaaagaattaaataccatcattcattatcagaagagttcaacgtttgaagtgctgggagataattctaattcattcttggatagtgaagcaaaactgattgaaaataccaagataagacagaaaaagtgactggaaagaggagcttttcttccaggcatgttccagtttcaccctaagactgaccttcaaataatcaggttgtactgaaataaaggacttgttaaaaattaaaattatgtcatcgagatgatagcttttttcctcctccaacagtttattgtcatgtgttgtgggagagctcgagtgaagagcaataaactccaggtcttataagaatgtacatacaataaaggtggtgccagcagtttttttttttctaaagagtcacatgtagaaaagcctccagtattaagctcctgaattcattccttaaataaattggctctctctctcttctataatttctttttctttttatttttgagatgaagtcttgctctgtcgcccaggctggagtgcagtgacacaatctcggctcactgcaacctctgcctccccggttcaagcaattctccctcctgcctcagcctcccaagtagctgggactacaagcgcccgccaccaagcctggctaattctgtatttttagtaaagacggggtttcaccttgttccggacaaacactaagccctaaagggaaatccaaaataaaaacatctatttttaataacactttctatctaaatcagggtgactttttaaaaaaaatccggaagctttttgttgaattacgttacagacttagttaccagtccttgttagagttaccttcagttgacatgctgtgaatggtcccacctcttttatggcagaattcattacttaaaataactctattttcttcccccttacctaaataacagaaaggctcactatgtcccaaatatcattggcagaagcaaactataaagtcataagccctttgcagtgcaagtctagaaataatttt

SEQ ID NO: 471 - protein, 1170 aa, Homo sapiens
MGLAWGLGVLFLMHVCGTNRIPESGGDNSVFDIFELTGAARKGSGRRLVKGPDPSSPAFRIEDANLIPPVPDDKFQDLVDAVRAEKGFLLLASLRQMKKTRGTLLALERKDHSGQVFSVVSNGKAGTLDLSLTVQGKQHVVSVEEALLATGQWKSITLFVQEDRAQLYIDCEKMENAELDVPIQSVFTRDLASIARLRIAKGGVNDNFQGVLQNVRFVFGTTPEDILRNKGCSSSTSVLLTLDNNVVNGSSPAIRTNYIGHKTKDLQAICGISCDELSSMVLELRGLRTIVTTLQDSIRKVTEENKELANELRRPPLCYHNGVQYRNNEEWTVDSCTECHCQNSVTICKKVSCPIMPCSNATVPDGECCPRCWPSDSADDGWSPWSEWTSCSTSCGNGIQQRGRSCDSLNNRCEGSSVQTRTCHIQECDKRFKQDGGWSHWSPWSSCSVTCGDGVITRIRLCNSPSPQMNGKPCEGEARETKACKKDACPINGGWGPWSPWDICSVTCGGGVQKRSRLCNNPTPQFGGKDCVGDVTENQICNKQDCPIDGCLSNPCFAGVKCTSYPDGSWKCGACPPGYSGNGIQCTDVDECKEVPDACFNHNGEHRCENTDPGYNCLPCPPRFTGSQPFGQGVEHATANKQVCKPRNPCTDGTHDCNKNAKCNYLGHYSDPMYRCECKPGYAGNGIICGEDTDLDGWPNENLVCVANATYHCKKDNCPNLPNSGQEDYDKDGIGDACDDDDDNDKIPDDRDNCPFHYNPAQYDYDRDDVGDRCDNCPYNHNPDQADTDNNGEGDACAADIDGDGILNERDNCQYVYNVDQRDTDMDGVGDQCDNCPLEHNPDQLDSDSDRIGDTCDNNQDIDEDGHQNNLDNCPYVPNANQADHDKDGKGDACDHDDDNDGIPDDKDNCRLVPNPDQKDSDGDGRGDACKDDFDHDSVPDIDDICPENVDISETDFRRFQMIPLDPKGTSQNDPNWVVRHQGKELVQTVNCDPGLAVGYDEFNAVDFSGTFFINTERDDDYAGFVFGYQSSSRFYVVMWKQVTQSYWDTNPTRAQGYSGLSVKVVNSTTGPGEHLRNALWHTGNTPGQVRTLWHDPRHIGWKDFTAYRWRLSHRPKTGFIRVVMYEGKKIMADSGPIYDKTYAGGRLGLFVFSQEMVFFSDLKYECRDP

SEQ ID NO: 472 - DNA, 105 bp, Homo sapiens
gttgtgggttgaagcactggacaatgccacatactttgtggatggtgtgggtcttgggggtcatcatcagcctctccaaggaagaatcctccaatcaggcttctc

SEQ ID NO: 473 - DNA, 3806 bp, Homo sapiens
aggccggctcggaggcagcgagaaagcgcagccaggcggctgctcggcgttctctcaggtgactgctcggagttctcccagtgtttggtgttgcaagcaggatccaaaggagacctatagtgactcccaggagctcttagtgaccaagtgaaggcaggaagacagggttctgatggtgtgagtctccttcaactcagcaaaccaccttggtctgcctcgagtttccaacacccctcctgcctgctagtgataggtgtgaggcaggttgatgaacatggaacttttttcttttggtcccaaagcatgctactcctggagtttcattcagtgaatgagaactatagtttggttctgtgagatctctatgaatcaaggcggccactgaagcggagaaaagaaatgcttaaatgttaagaaagtttgaagtgcagaaaaaggttgaagcactggacaatgccacatactttgtggatggtgtgggtcttgggggtcatcatcagcctctccaaggaagaatcctccaatcaggcttctctgtcttgtgaccgcaatggtatctgcaagggcagctcaggatctttaaactccattccctcagggctcacagaagctgtaaaaagccttgacctgtccaacaacaggatcacctacattagcaacagtgacctacagaggtgtgtgaacctccaggctctggtgctgacatccaatggaattaacacaatagaggaagattctttttcttccctgggcagtcttgaacatttagacttatcctataattacttatctaatttatcgtcttcctggttcaagcccctttcttctttaacattcttaaacttactgggaaatccttacaaaaccctaggggaaacatctcttttttctcatctcacaaaattgcaaatcctgagagtgggaaatatggacaccttcactaagattcaaagaaaagattttgctggacttaccttccttgaggaacttgagattgatgcttcagatctacagagctatgagccaaaaagtttgaagtcaattcagaatgtaagtcatctgatccttcatatgaagcagcatattttactgctggagatttttgtagatgttacaagttccgtggaatgtttggaactgcgagatactgatttggacactttccatttttcagaactatccactggtgaaacaaattcattgattaaaaagtttacatttagaaatgtgaaaatcaccgatgaaagtttgtttcaggttatgaaacttttgaatcagatttctggattgttagaattagagtttgatgactgtacccttaatggagttggtaattttagagcatctgataatgacagagttatagatccaggtaaagtggaaacgttaacaatccggaggctgcatattccaaggttttacttattttatgatctgagcactttatattcacttacagaaagagttaaaagaatcacagtagaaaacagtaaagtttttctggttccttgtttactttcacaacatttaaaatcattagaatacttggatctcagtgaaaatttgatggttgaagaatacttgaaaaattcagcctgtgaggatgcctggccctctctacaaactttaattttaaggcaaaatcatttggcatcattggaaaaaaccggagagactttgctcactctgaaaaacttgactaacattgatatcagtaagaatagttttcattctatgcctgaaacttgtcagtggccagaaaagatgaaatatttgaacttatccagcacacgaatacacagtgtaacaggctgcattcccaagacactggaaattttagatgttagcaacaacaatctcaatttattttctttgaatttgccgcaactcaaagaactttatatttccagaaataagttgatgactctaccagatgcctccctcttacccatgttactagtattgaaaatcagtaggaatgcaataactacgttttctaaggagcaacttgactcatttcacacactgaagactttggaagctggtggcaataacttcatttgctcctgtgaattcctctccttcactcaggagcagcaagcactggccaaagtcttgattgattggccagcaaattacctgtgtgactctccatcccatgtgcgtggccagcaggttcaggatgtccgcctctcggtgtcggaatgtcacaggacagcactggtgtctggcatgtgctgtgctctgttcctgctgatcctgctcacgggggtcctgtgccaccgtttccatggcctgtggtatatgaaaatgatgtgggcctggctccaggccaaaaggaagcccaggaaagctcccagcaggaacatctgctatgatgcatttgtttcttacagtgagcgggatgcctactgggtggagaaccttatggtccaggagctggagaacttcaatccccccttcaagttgtgtcttcataagcgggacttcattcctggcaagtggatcattgacaatatcattgactccattgaaaagagccacaaaactgtctttgtgctttctgaaaactttgtgaagagtgagtggtgcaagtatgaactggacttctcccatttccgtctttttgatgagaacaatgatgctgccattctcattcttctggagcccattgagaaaaaagccattccccagcgcttctgcaagctgcggaagataatgaacaccaagacctacctggagtggcccatggacgaggctcagcgggaaggattttgggtaaatctgagagctgcgataaagtcctaggttcccatatttaagaccagtctttgtctagttgggatctttatgtcactagttatagttaagttcattcagacataattatataaaaactacgtggatgtaccgtcatttgaggacttgcttactaaaactacaaaacttcaaattttgtctggggtgctgttttataaacatatgccagatttaaaaattggtttttggtttttcttttttctatgagataaccatgatcataagtctattactgatatctgaatatagtcccttggtatccaagggaattggttgcaggatcctcgtggatatcaaaattcatagatgatcaagtcccttataagagtggcatagtatttgcatataacctgtgtacattctcctgtatactttaaatcatctctagattacttatgatacccaatacaatgtaaatactatgtaaatagttgtactgtctttttatttatattattattgttattttttattttcaaaatttttaaaacatacttttgatccacagttggttgacttcatggatgcagaacccatggatatagagggccaactgtaatctgtagcaactggcttagttcattaggaaacagcacaaatgaacttaagattctcaatgactgtgtcattctttcttcctgctaagagactcctctgtggccacaaaaggcattctctgtcctacctagctgtcacttctctgtgcagctgatctcaagagcaacaaggcaaagtatttggggcactccccaaaacttgttgctattcctagaaaaaagtgctgtgtatttcctattaaactttacaggatgagaaatactagagggtgtattttcatgtgatctggatctgtctttctggctattagataggtttctccagccatagttacttgagagagtgagtacacagtgcaaggtacagtaaattatgtatttctgtaatttaacaaaataaatactcagtttaggagaatttgaaagaca

SEQ ID NO: 474 - protein, 784 aa, Homo sapiens
MPHTLWMVWVLGVIISLSKEESSNQASLSCDRNGICKGSSGSLNSIPSGLTEAVKSLDLSNNRITYISNSDLQRCVNLQALVLTSNGINTIEEDSFSSLGSLEHLDLSYNYLSNLSSSWFKPLSSLTFLNLLGNPYKTLGETSLFSHLTKLQILRVGNMDTFTKIQRKDFAGLTFLEELEIDASDLQSYEPKSLKSIQNVSHLILHMKQHILLLEIFVDVTSSVECLELRDTDLDTFHFSELSTGETNSLIKKFTFRNVKITDESLFQVMKLLNQISGLLELEFDDCTLNGVGNFRASDNDRVIDPGKVETLTIRRLHIPRFYLFYDLSTLYSLTERVKRITVENSKVFLVPCLLSQHLKSLEYLDLSENLMVEEYLKNSACEDAWPSLQTLILRQNHLASLEKTGETLLTLKNLTNIDISKNSFHSMPETCQWPEKMKYLNLSSTRIHSVTGCIPKTLEILDVSNNNLNLFSLNLPQLKELYISRNKLMTLPDASLLPMLLVLKISRNAITTFSKEQLDSFHTLKTLEAGGNNFICSCEFLSFTQEQQALAKVLIDWPANYLCDSPSHVRGQQVQDVRLSVSECHRTALVSGMCCALFLLILLTGVLCHRFHGLWYMKMMWAWLQAKRKPRKAPSRNICYDAFVSYSERDAYWVENLMVQELENFNPPFKLCLHKRDFIPGKWIIDNIIDSIEKSHKTVFVLSENFVKSEWCKYELDFSHFRLFDENNDAAILILLEPIEKKAIPQRFCKLRKIMNTKTYLEWPMDEAQREGFWVNLRAAIKS

SEQ ID NO: 475 - DNA, 112 bp, Homo sapiens
gcagatgtttaagcccttggactgagggtgggatcgcagctccgaagacggagaggagggaaatggggccctttcccctctattgcatccccctgcccgactccttccccgc

SEQ ID NO: 476 - DNA, 1822 bp, Homo sapiens
agagcagcgcggcagcccaagggccccggcgccgggggcggcggggaaccccaaacgcaaccgggtctggagggatccccgcgccgagccagccgccgtcaccgcctccgcgccgcccctgcgggcttggcaggcgcccggcgcgcccgcactgcgcccggccgccggctcccgcggtcccaccgtgagctcgccggcccgtcgcccgctcgccatgcaaccgccgccggcctcgcgcgcgtaggcgcccgccgcaggccatgctgcccctgctcgccgcgctcctggccgccgcctgcccgctgccgcccgtccgcggcggggccgcggacgcgcccggcctcctcggggtgccctccaatgcttcagtcaacgcgtcctccgcggacgagcccatcgccccgcggctgctggcctcggcggcccccgggccccccgagcgcccgggcccggaggaggcggcggcggcggcggcgccgtgcaacatcagcgtgcagcggcagatgctgagctcgctgctcgtgcgctggggccgcccgcggggcttccagtgcgacctactgctcttctccaccaacgcgcacggccgcgctttcttcgccgccgccttccaccgcgtcgggccgccgctgctcatcgagcacctggggctggcggcgggcggcgcgcagcaggacctgcgcctctgcgtgggctgcggctgggtgcgcggtcgccgcaccggccgcctccggcccgccgccgcccccagcgccgccgccgccaccgccggggcgcccaccgcgctgccagcctaccccgcggccgagccgcccgggccgctgtggctgcagggcgagccgctgcatttctgctgcctagacttcagcctggaggagctgcagggcgagccgggctggcggctgaaccgtaagcccattgagtccacgctggtggcctgcttcatgaccctggtcatcgtggtgtggagcgtggccgccctcatctggccggtgcccatcatcgccggcttcctgcccaacggcatggaacagcgccggaccaccgccagcaccaccgcagccacccccgccgcagtgcccgcagggaccaccgcagccgccgccgccgccgccgctgccgccgccgccgcggccgtcacttcgggggtggcgaccaagtgacccgctccgctcctccctgtgtccgtcctgtgtccgcgcgcgcgggtgcctttcccgccggagactcggccggtgtgcttcgtgctgtagttatcgttagttcctcttcccgagatggggccgccgagagaccccagcgcctttgaaaagcaaggtttgtgctgcgcttccagttccgaaaagcagatgtttaagcccttggactgagggtgggatcgcagctccgaagacggagaggagggaaatggggccctttcccctctattgcatccccctgcccgactccttccccgcacccacgtgccctagattcatggcagaaaatgaccaaatcctgtgtatttgttttatatatttaataactgttttaaatgaaagttttagtaaaaaaaatacaaaacaaaaagattaaattgctattgctgtagtaagagaagctctttgtatctgaacatagttgtatttgaaatttgtggttttttaatttatttaaaattggggggagggcatgggaaggatttaacaccgatatattgttaccgctgaaaatgaactttatgaaccttttccaagttgatctatccagtgacgtggcctggtgggcgtttcttcttgtacttatgtggttttttggcttttaatacagacattttcctcca

SEQ ID NO: 477 - protein, 300 aa, Homo sapiens
MLPLLAALLAAACPLPPVRGGAADAPGLLGVPSNASVNASSADEPIAPRLLASAAPGPPERPGPEEAAAAAAPCNISVQRQMLSSLLVRWGRPRGFQCDLLLFSTNAHGRAFFAAAFHRVGPPLLIEHLGLAAGGAQQDLRLCVGCGWVRGRRTGRLRPAAAPSAAAATAGAPTALPAYPAAEPPGPLWLQGEPLHFCCLDFSLEELQGEPGWRLNRKPIESTLVACFMTLVIVVWSVAALIWPVPIIAGFLPNGMEQRRTTASTTAATPAAVPAGTTAAAAAAAAAAAAAAVTSGVATK

SEQ ID NO: 478 - DNA, 107 bp, Homo sapiens
agatgaaatccttggagccctaacagaggaagagctgaggaccctggaaaatgagctggatgagctggaccctgataatgcactgctgcctgcaggcctgaggcaga

SEQ ID NO: 479 - DNA, 3311 bp, Homo sapiens
gagctcgtccagccccgcgctgcgctcgcccgcccgctgcccgccggagcaccgcggcctccgcccgcgtccatctgcccgccgcccgcgcctgttccgcagcccgcgtccgcgccggccccacagctctgcgtccgggtattactcagcacagaaattcaggagacacagacaagttcttccacgatgtcgtacagacgagaactagagaaataccgtgacctggatgaagatgaaatccttggagccctaacagaggaagagctgaggaccctggaaaatgagctggatgagctggaccctgataatgcactgctgcctgcaggcctgaggcagaaggatcagaccaccaaggcgcccacgggcccctttaaaagagaggagctcttggatcacttggaaaagcaagcaaaggagtttaaggaccgagaagatctggtcccctacacaggggaaaaacgaggaaaggtctgggttcctaagcagaagccactggatcctgtgctggaaagtgtgacgctggaaccggagctggaggaagccttggcaaatgcttcagatgcagaactctgtgacattgcagcgatcctgggcatgcacacgctcatgagtaaccagcagtactaccaggccctgagcagcagctccatcatgaacaaggaggggctcaacagcgtgattaaacccacacaatacaagcctgtgcccgacgaagaaccaaattcaacagacgtagaggaaacgctggaacggataaagaacaacgacccaaaacttgaagaagttaacctcaataatatccggaatatccccatccccaccctcaaggcatatgcagaagccctgaaagaaaactcatatgtgaagaagttcagcatcgtggggacacggagtaatgaccccgtggcgtatgcccttgctgagatgctcaaggagaacaaggtgttgaagacactgaatgtggaatccaacttcatttctggagctgggattctgcgcctggtagaagccctcccatacaacacttctctggtggaaatgaaaattgacaaccagagccagcccctgggcaacaaagtggaaatggagattgtgagcatgttggaaaaaaacgcaacacttctcaaattcggctaccactttacccagcaaggaccccggcttcgggcatccaacgcaatgatgaacaacaatgaccttgtgaggaagaggaggcttgcggacctgactgggcccatcattcccaagtgccggagtggtgtctagtgtgtggcggtggagtccatgcctttgaactggatgtgttctattgatgacctgtgctctgcaggggaaaccagaaggcaaaatgctggcagcatgaaacccttttgtggttcagttctttatgcactaaggttttaggttgactagtggttgtagttgaaaattttataaaataccgttaatgtgaagtttttctttagtcacagaagttgaatctggttattatttaaaaactagaagcccccaaaccagcagatcttactgaagatgatgttccagcagcagcgacttagccccaggagcccagtttcaatggccttgctgtgtggtgtttcaagtgcatttaaaatgtgtgacacagaaacggcacactcttccacatgcttttgaagtattataaaacactttattacaaatttgtcttagctattagcaaataaaactgattatcattctttattaaccctccttggaattttgaaaacctcgattaaagttgccaaattgattactggatccagaacacaattttcccctcagaacagatagacagactgaagccactgaactctgccaggagtcaacatgagattccttttgctggatatgcagaaatgataggaaaaaaaccaatggtgaaatttcaagtttcaaaaaccaacctttcattaccaatcccaggcaacaaacatgtccctgagtgttctttaagaacatttgggatttatgtacaatttaatactggagttagaactttttccttattgaatgccaaccttatgatggatgtgaaaatctacggccaaatacttttgaaaacacctttctatattgcacagtgggcaaatggcttatgtgaggtaagacactagagggataaatttccagatcaacatggctatggtatttagtaatggcccagcttagagacttcagctactgatctcatcacttattagacaaattgctgctgaccttacgcctgtatattaagcctccgcaggatgccggacaatggtgaagaaactccagatatcaaggaattgggaaatcctggccaaaccaccccaagatgattacactgaaatgtagtattagtactgctgccagatctctttttaacatcatgtgcgtctcttgggatccagcaaaagtgttaagccacaatgcccttgtgccttttaatataccacagtgccagttaaactaatatttttgtttgttgcttttgggagttattttcattagtgatttcagcaaatctcatgataaaggacaaggtcaagaactccagagcactgagcagagaggctggtgatgaaaaggtgaaggcctgcgcactgaactgtaaggcagtgggcagtacagggtaactggaggcggggccagggcctcagcgctatggaagagtgtccactgaggctgcacatggcccaggagtggcaccatgttgcagggacaaccatccccatttggcttctccttaaaacacaattgcagctgcattctgcatcgctgaaaactgcaatataatattaaatctgttggtctatgcatggctgcgtatgtgtttcttggaacctgtgtgacagggacatgtgcctggcacactggccagaagactgggcagccaccatggcagtgctggatgacctcagtaagaatgtgtcatgtattccaggtgctgatctaaaaactgtggctcaaatgtcaccgagcttatatgaagctcccagagagaacatttaaaagctcagagagtaagtgctggggaaagcagagctatcagaggaaatctctcatagaaacgaaaccaaaccaacagaaaatgaagaaggccacatctttaaggccacctctgcctctatcagatgagctgctggtctagatcaggggctggcaaacttttctgtaaaaggccagacagtaaaaatttccgattttgcaggccacatagtgtctgttgcaactattcaactctgccatagatcatgtgtaaaggaatgggtgtggctgttcaataaactatacagttgacccttgaa

SEQ ID NO: 480 - protein, 359 aa, Homo sapiens
MSYRRELEKYRDLDEDEILGALTEEELRTLENELDELDPDNALLPAGLRQKDQTTKAPTGPFKREELLDHLEKQAKEFKDREDLVPYTGEKRGKVWVPKQKPLDPVLESVTLEPELEEALANASDAELCDIAAILGMHTLMSNQQYYQALSSSSIMNKEGLNSVIKPTQYKPVPDEEPNSTDVEETLERIKNNDPKLEEVNLNNIRNIPIPTLKAYAEALKENSYVKKFSIVGTRSNDPVAYALAEMLKENKVLKTLNVESNFISGAGILRLVEALPYNTSLVEMKIDNQSQPLGNKVEMEIVSMLEKNATLLKFGYHFTQQGPRLRASNAMMNNNDLVRKRRLADLTGPIIPKCRSGV

SEQ ID NO: 481 - DNA, 108 bp, Homo sapiens
tcgctgtctccttccccagcacagccaatgaggagaacttccggagcaacctccgtgaggtggcgcagatgctcaagtccaaacatggaggcaactacctgctgttca

SEQ ID NO: 482 - DNA, 10474 bp, Homo sapiens
agttgctcccagcagtggccctgggaccagctctgctccttgcaccccgctccctgcctggacacaggctcactcgctgccttcttctgggggaaaccagcttcttgccagccacagctgctgcctccgccactggccaccgcccctgtcctgggagtcccttggcccagacacccacctgacttagtggctcctctgcaggaaaggtggctgccccctgcgttcctccatccaaccatgagctggtgcccatcaccactgagaatgcaccaaagaatgtagtggacaagggagaaggagcctcccggggtggaaacacacggaaaagcctcgaggacaacggctccaccagggtcaccccgagtgtccagccccacctccagcccatcagaaacatgagtgtgagccggaccatggaggacagctgtgagctggacctggtgtacgtcacagagaggatcatcgctgtctccttccccagcacagccaatgaggagaacttccggagcaacctccgtgaggtggcgcagatgctcaagtccaaacatggaggcaactacctgctgttcaacctctctgagcggagacctgacatcacgaagctccatgccaaggtactggaatttggctggcccgacctccacaccccagccctggagaagatctgcagcatctgtaaggccatggacacatggctcaatgcagaccctcacaatgtcgttgttctacacaacaagggaaaccgaggcaggataggagttgtcatcgcggcttacatgcactacagcaacatttctgccagtgcggaccaggctctggaccggtttgcaatgaagcggttctatgaggataagattgtgcccattggccagccatcccaaagaaggtacgtgcattacttcagtggcctgctctccggctccatcaaaatgaacaacaagcccttgtttctgcaccacgtgatcatgcacggcatccccaactttgagtctaaaggaggatgtcggccatttctccgcatctaccaggccatgcaacctgtgtacacatctggcatctacaacatcccaggagacagccagactagcgtctgcatcaccatcgagccaggactgctcttgaagggagacatcttgctgaagtgctaccacaagaagttccgaagcccagcccgagacgtcatcttccgtgtgcagttccacacctgtgccatccatgacctgggggttgtctttgggaaggaggaccttgatgatgctttcaaagatgatcgatttccagagtatggcaaagtggagtttgtattttcttatgggccagagaaaattcaaggcatggagcacctggagaacgggccgagcgtgtctgtggactataacacctccgaccccctcatccgctgggactcctacgacaacttcagtgggcatcgagatgacggcatggaggaggtggtgggacacacgcaggggccactagatgggagcctgtatgctaaggtgaagaagaaagactccctgcacggcagcaccggggctgttaatgccacacgtcctacactgtcggccacccccaaccacgtggaacacacgctttctgtgagcagcgactcgggcaactccacagcctccaccaagaccgacaagaccgacgagcctgtccccggggcctccagtgccactgctgccttgagtccccaggagaagcgggagctggaccgcctgctgagtggctttggcttagagcgagagaagcaaggcgccatgtaccacacccagcacctcaggtcccgcccagcagggggctcggctgtgccctcctctggacgccacgttgtcccagcccaggttcatgtcaatggtggggcgttagcatctgagcgggagacagacatcctggacgatgaattgccaaaccaggatggtcacagtgcgggcagcatgggcacactctcttctctggacggggtcaccaacaccagtgaggggggctacccagaggccctgtccccactgaccaacggtctggacaagtcctaccccatggagcctatggtcaatggaggaggctacccctacgagtctgccagccgggcggggcctgcccatgctggccacacggcccccatgcggccctcctactctgcacaggagggtttagctggctaccagagggaggggccccacccagcctggccacagccagtgaccacctcccactatgcccatgaccccagcggtatgttccgctctcaatccttttcggaagctgaaccccagctgcccccagctccggtccgagggggaagcagccgggaggctgtgcaaaggggactgaattcgtggcagcagcagcagcagcagcagcagcagcctcgcccacctccacgccagcaggaaagagcccacttggagagtcttgtagccagcaggcccagccctcagccattggcagagacccccatccccagtctccctgagttcccgcgagcagcctcccagcaggagattgaacagtccatcgaaacactcaatatgctgatgctggacctggagccagcctccgctgctgccccactacacaagtcccagagtgtccccggggcctggccaggggcttctccactctcctcccagcccctctctggatcctcccgtcagtcccatccactgacccagtccagatctggctatatccccagtgggcattcgttgggaacccctgagccagccccacgggcctctctggagtctgtccctcctggcaggtcttactcaccttatgactatcagccatgtttggctgggcctaaccaggatttccattcaaagagcccagcctcttcctccttgcctgccttccttccgaccacccacagccctccagggcctcagcaacccccagcctctctccctggcctcactgctcagcctctgctctcaccaaaggaagcgacttcagacccctcccggactccagaggaggagccattgaatttagaagggctggtggcccacagggtagcaggggtacaggctcgggagaagcagcctgcagagcccccagcccctctgcggaggcgggcggccagtgatggacagtatgagaaccagtctccagaagccacatcccctcgtagccctggggttcgctcccctgtccagtgtgtctccccggagctggctcttaccatcgctctcaatcctggagggcggcccaaagagccccatttgcacagctacaaggaggccttcgaggagatggagggaacctccccgagcagcccaccacccagtggggtgcggtcccccccgggtctggccaagacacccctgtctgctctgggcctgaaacctcacaacccagcggacatcctgttgcaccccacaggagttaccagaagacggatccagccagaggaagatgaggggaaggtggtggtcaggctgtcagaagagccccggagctatgtggagtctgtggcacggacagcggtggctggaccccgagctcaggactctgagcccaagagctttagtgctccagccacccaggcctatggccatgagatacccctgaggaacgggaccctgggtggctcctttgtctcccccagccccctctccaccagcagccccatcctcagtgctgacagcacttcagtggggagtttcccgtcgggagagagcagtgaccagggtccccggacgcccacccagcctctgttggagtctggcttccgctcaggcagcctgggacagcccagcccgtctgcccagagaaactaccagagctcttctcctctcccgactgtgggcagtagctacagcagccccgactactcacttcagcatttcagctcctctccggaaagccaggctcgagctcagttcagtgtggctggcgtccacacggtgcctgggagccctcaggcgcgccacagaacagtgggcaccaacactccccctagtcctggcttcggctggcgggccatcaatcccagcatggctgcccccagcagtcccagtttgagccatcaccagatgatgggtccaccaggcactggcttccatggtagcactgtctccagcccccagagcagtgcagcgaccaccccggggagccccagcctgtgtcggcacccagcaggggtctaccaggtttctggcctccacaacaaagtggccaccaccccggggagtcccagcctgggccggcaccctggggctcaccaaggcaacctggcctccggtcttcatagcaatgcaatagccagccctggaagccccagcctgggccgtcacctcggagggtctggatctgtggttcccggcagcccctgcttggaccggcatgtggcctatggtggctattctaccccggaggatcggagacccacactgtcccggcagagcagtgcctctggctaccaggctccttccacgccctccttccctgtctcccctgcctactaccctggcctgagcagccctgccacctccccgtcaccagactccgcagccttccggcaagggagcccaacaccagccttgccagagaagcgaaggatgtcagtgggagaccgggcaggcagcctccccaactatgccaccatcaatgggaaggtgtcttcgcctgtcgccagcggcatgtccagtcccagtgggggcagcaccgtctccttctcccacactctgcccgacttctccaagtactccatgccagacaacagcccggagacgcgggctaaagtgaagtttgtccaggacacttctaagtattggtacaagcctgagatctccagggagcaggccatcgcgctcctcaaggaccaggagccgggggccttcatcatccgcgacagtcactccttccgaggcgcgtacgggctggccatgaaggtgtcttcgccacctccaaccatcatgcagcagaataaaaaaggagacatgacccatgagctggtcaggcattttctgatagagactggccccagaggagtcaagctcaagggctgccccaatgagccaaacttcggatcgctgtctgccctggtctaccagcactccatcatcccattggccctgccttgcaagctggtcattccaaaccgagaccccacagatgaatcgaaagatagctccggccctgccaactcaactgcagacctgctgaaacaaggggcagcctgcaatgtgctcttcgtcaactctgtggacatggagtcactcactgggccacaggccatctctaaagccacatctgagacgttggctgcagaccccacgccagctgccaccatcgttcacttcaaagtctctgcccagggaatcactctgactgacaaccagagaaagctctttttcagacgccactaccctctcaacactgtcaccttctgtgacctggatccacaggaaagaaagtggatgaaaacagagggtggtgcccctgctaagctcttcggcttcgtggcccggaagcagggcagcaccacggacaacgcctgccacctctttgctgagcttgaccccaaccagccggcctctgccatcgtcaacttcgtctccaaggtcatgctgaatgccggccaaaagagatgaaccctgccccttgcccagggccagtgccatggggaaggggcttgtggggaggggacccatgaatcctgaccactcttgaacccagaaggaggactttgggccaatttcggaggagagaagaaagtgcaacgtggggagagggaagtgaattgcagaggggagggggaaaagagagagagagagagagagagagagagagagaaagatggaggagaagaacttggattcccctgggtagatggaaactgcaaaaacccaaagcctccaaaactaaccaggtccacctaacaccccctccctcccctaagaagatggatgtcctcaaaagagaaggaacaaacctccttgggaatccacattttttgggggaatggaaaagctctgtctccctaactcaactgctttgcaaggggaaatcaagctgggagaatctttttctggccacctgtggggtaggttgtcaaaccaaacagagccaccgtgggacatcaagtggaagaacttgtttgcttgaaagtatctcagacccaaggcacctcaggtctctttgctgtgcctccactatattgtcgtgtgggtgtgtgtctgcacccacatcctcacacattgatctagatctgcctttatccactcgaattataaacagctcggcttgtccttgtcccatgtgtttgtagacacacatgcatactgtccaaagattagggttggtggtggcagtgcagcaggggagggacaaacaaccaagctatgggtgacagaggctctctcctggtgcctgcacctgcactctagtgaccctgggtgccgccagacccttctcttctacaaagaccccagcaggagtgggagggtctgcaatggcatcgccctgtcctgccttggccagaagcctggagctttggtttgaggaggtagagatatgtgtatccataggaagagatctgtcagaacaggcagctgttgagctcggggtgtcttccccaaggcatgtggctcagcagcaagaaaggcaagttgctcctgctggggccctggactctgccttagctcccacctctcagccttgttattgggtttcatgcccctggaccagccttatctcagacctgcttacctgcatgatgcctttttgggggctggggattgagtcttgctgctctgcccagccctgttctattctgcagggtccctgtgttggaattctccctggggaacctactttctgctcagtgaggctccggccagaaacctggagtccttatcctcccctctgtaagtgttttagggtctggcttttgcaggcaccctctgacctcagcagagctcctgggcctgctgcctgcacaccacatcgcctacctacaatgccaaagcctcactgtcaccctttctgccttggtttccctagctgagccacgctgcccatgcagcagagggcagaaggcttgcacttgggccaaagggcctaaggtccactggacagttgggaaaacacctgaccaccatttaaggactctaagccagaatggaaaattcaccaggactccattcttaagcctatgcgagtcccctagagagaggcattgtactgatatataaatattatataatatatacatgagacatactgacagaatctgtaagctaataaaatgtaagaaaaggttaaaaaaagaataggtaaattgacaagaagtatttattgtttttccatattgctttattgccttccttggggataaaccaattcctatccttttttatatgtgtaagtaaagcctgaagtgtagggggcctttgttcttgaagcagccagggtctccttgccctggccttggccttccctagactgtgtggggctcagcattgggaggggttgcacatgtcccagcctttggcccccttacttttcagcaagccaggggcccagcagtcagctcccaggatgtgtggggagctgtccctgactctgcaggcctgagcgagtgtgtgagcatgcggggacatgggtgtgtatggcacacataggtgcgtgtgtgtcttttgtattttttctcctccaaggagctgtgtcagtgtggacgttctgtttcagggagttggaaaggagggtgtctgcagaaggtggagagcaggggcagaggccccactggccaccccctgcttcccagagtgaaaccttgtgcctggtgaccaaagtccctccaaagtgctcttccttctgggttattcaagccaaatatctgggtttccccctctcctcattccctagcaaaccccaattatcttccaagataggagatatttcccatccccttcctttgtaaatatctcatctcccactggagagcccaggagcctattcctggcatggatgttctgtccacacttgaggctgggcggtgtatcagacccttcaagcagcctggctggggcccaggactgagtctggggtcagctttcacggtcgcttttcccttcctcaccacccaccacagcccaccttgcatgcatggccagcccctccactccagcctgagccatgtgtgcccctgcgggaggacccattcatgccagaaagctggtaactccctcccagcatccctgcggaaggagtcagtttctgagagtgtgacttttcaaggcgaatgatggggaagggttccccagtccccacagtggccccacctctgggccctgcaccagagcccttctgtgtcacggcgggctgtgcacccatgcacacacctacgcacacacaacactccgcactgcagtatattcttgccaaagatttcctttaaaagcaagcacttttactaattattattttgtaaatgtttatcttcttctgtcttctccctccctgaatctattttactgttgtttattgttgaatctgtgtgtcagccaggagagcgctgtctggccttgaacatgggctgggatgggaaagggtctgggagaagatgggcaacaaagagccagggagtcatggacatcgcagcgacgcagaccccagcaggttcagtcccgtgctgccaccagctgtccagctgggtgtctggagggaagagggcagaggagggtcatgtcccttcagctgggggaggggcccagtgagctccacgtggctttttcccaaagggagcaagagggaaggattgggcgagaaaacaatggagaggggacctgcgaaggaaaacagggaggaagtgagcggtttgatcagcctgctatcacggtgttctggctctcttatttagccaggcgcttaagggacagatacatcacatcctaagtttgggaaaggcctttgacccatgtcatctgagcgtctcctccagtagctctgaaagctgtggacaccaatggccaggattccttctcccctggtttttgaggatccctgggtcttctgagactggccaggagagggatggtggggccagtggttgtgtgaaagcaggaggggcagccctcctggacaagtgtgatccccctataaacggctctcaggaggttagtgagtaggagattctgccttgttctgatgagcctgtgcaggggctccaggggagcatgctgtccagggggcacagaagggtggtgagtgtgatcaaatctagtctcactcccactttttagtctcactcctacttttgtccaccacccctgcctcctggatcttctcccactttttttttcagctttaggacctggggagatcctgtgagtcaaggcagacacccaatcctgcccccacactcggggtcctccaagaggttggggggcagagtcccagagcagccctttaccccaggtccaggccctggaatcctgagactcgcgtttccttggccagtggtaacacaggacgtgtgtgcgcatgtgcaagtgtggatgtatgtgtgtgcgtgtgttttgctcatttctttagggaacttgggagtcggggttggaggtgctgggcaatggaacttcaaattcaatgtcgcccagcagtgaggggagtcgggaggtgaggcctgtaggccaaccaattggtggagtctcagcgatagcccaggtgagaagtggttcacccagaggggcagggtgggggcctcgggcagatctgtccctcttggcacctctgtcctcaaatgtccaaaatgttggaggacctctgttcatatcccacgcctgggctcttgccagcagtggagttactgtagagggatgtcccaagcttgttttccaatcagtgttaagctgtttgaaactctcctgtgtctgtgttttgtttgtgcgtgtgtgtgagagcacatcagtgtgtgcaggctgtgtttccccatttctctcctcccttcagacccatcattgagaacaaatgtaagaaatcccttcccaccaccctccctgcctcccaggccctctgcgggggaaacaagatcacccagcatccttccccaccccagctgtgtatttatatagatggaaatatactttatattttgtatcatcgtgcctatagccgctgccaccgtgtataaatcctggtgtatgctccttatcctggacatgaatgtattgtacactgacgcgtccccactcctgtacagctgctttgtttctttgcaatgcattgtatggctttataaatgataaagttaaagaaaactctgtgccgttatctatctgtgttgttcggacaggggtctgccatgtctctggtgggcaaaaaggggcctctccagagatccaggtgggcttcagcgatgcctctagtggacagctcaaatcctcccagcggcctccccaccatctgcgtggtggttctggttccctgtgtttattcatttggactctttcagctgcaagagaaa

SEQ ID NO: 483 - protein, 1735 aa, Homo sapiens
MSVSRTMEDSCELDLVYVTERIIAVSFPSTANEENFRSNLREVAQMLKSKHGGNYLLFNLSERRPDITKLHAKVLEFGWPDLHTPALEKICSICKAMDTWLNADPHNVVVLHNKGNRGRIGVVIAAYMHYSNISASADQALDRFAMKRFYEDKIVPIGQPSQRRYVHYFSGLLSGSIKMNNKPLFLHHVIMHGIPNFESKGGCRPFLRIYQAMQPVYTSGIYNIPGDSQTSVCITIEPGLLLKGDILLKCYHKKFRSPARDVIFRVQFHTCAIHDLGVVFGKEDLDDAFKDDRFPEYGKVEFVFSYGPEKIQGMEHLENGPSVSVDYNTSDPLIRWDSYDNFSGHRDDGMEEVVGHTQGPLDGSLYAKVKKKDSLHGSTGAVNATRPTLSATPNHVEHTLSVSSDSGNSTASTKTDKTDEPVPGASSATAALSPQEKRELDRLLSGFGLEREKQGAMYHTQHLRSRPAGGSAVPSSGRHVVPAQVHVNGGALASERETDILDDELPNQDGHSAGSMGTLSSLDGVTNTSEGGYPEALSPLTNGLDKSYPMEPMVNGGGYPYESASRAGPAHAGHTAPMRPSYSAQEGLAGYQREGPHPAWPQPVTTSHYAHDPSGMFRSQSFSEAEPQLPPAPVRGGSSREAVQRGLNSWQQQQQQQQQPRPPPRQQERAHLESLVASRPSPQPLAETPIPSLPEFPRAASQQEIEQSIETLNMLMLDLEPASAAAPLHKSQSVPGAWPGASPLSSQPLSGSSRQSHPLTQSRSGYIPSGHSLGTPEPAPRASLESVPPGRSYSPYDYQPCLAGPNQDFHSKSPASSSLPAFLPTTHSPPGPQQPPASLPGLTAQPLLSPKEATSDPSRTPEEEPLNLEGLVAHRVAGVQAREKQPAEPPAPLRRRAASDGQYENQSPEATSPRSPGVRSPVQCVSPELALTIALNPGGRPKEPHLHSYKEAFEEMEGTSPSSPPPSGVRSPPGLAKTPLSALGLKPHNPADILLHPTGVTRRRIQPEEDEGKVVVRLSEEPRSYVESVARTAVAGPRAQDSEPKSFSAPATQAYGHEIPLRNGTLGGSFVSPSPLSTSSPILSADSTSVGSFPSGESSDQGPRTPTQPLLESGFRSGSLGQPSPSAQRNYQSSSPLPTVGSSYSSPDYSLQHFSSSPESQARAQFSVAGVHTVPGSPQARHRTVGTNTPPSPGFGWRAINPSMAAPSSPSLSHHQMMGPPGTGFHGSTVSSPQSSAATTPGSPSLCRHPAGVYQVSGLHNKVATTPGSPSLGRHPGAHQGNLASGLHSNAIASPGSPSLGRHLGGSGSVVPGSPCLDRHVAYGGYSTPEDRRPTLSRQSSASGYQAPSTPSFPVSPAYYPGLSSPATSPSPDSAAFRQGSPTPALPEKRRMSVGDRAGSLPNYATINGKVSSPVASGMSSPSGGSTVSFSHTLPDFSKYSMPDNSPETRAKVKFVQDTSKYWYKPEISREQAIALLKDQEPGAFIIRDSHSFRGAYGLAMKVSSPPPTIMQQNKKGDMTHELVRHFLIETGPRGVKLKGCPNEPNFGSLSALVYQHSIIPLALPCKLVIPNRDPTDESKDSSGPANSTADLLKQGAACNVLFVNSVDMESLTGPQAISKATSETLAADPTPAATIVHFKVSAQGITLTDNQRKLFFRRHYPLNTVTFCDLDPQERKWMKTEGGAPAKLFGFVARKQGSTTDNACHLFAELDPNQPASAIVNFVSKVMLNAGQKR

SEQ ID NO: 484 - DNA, 103 bp, Homo sapiens
atccagcgtttcgtagaaaccccagctcatttctcttggaaagaaagttattaccgatccaccatgtcccagagcacacagacaaatgaattcctcagtccag

SEQ ID NO: 485 - DNA, 4944 bp, Homo sapiens
ctatgtctgatagcatttgaccctattgcttttagcctcccggctttatatctatatatacacaggtatatgtgtatattttatataattgttctccgttcgttgatatcaaagacagttgaaggaaatgaattttgaaacttcacggtgtgccaccctacagtactgccctgacccttacatccagcgtttcgtagaaaccccagctcatttctcttggaaagaaagttattaccgatccaccatgtcccagagcacacagacaaatgaattcctcagtccagaggttttccagcatatctgggattttctggaacagcctatatgttcagttcagcccattgacttgaactttgtggatgaaccatcagaagatggtgcgacaaacaagattgagattagcatggactgtatccgcatgcaggactcggacctgagtgaccccatgtggccacagtacacgaacctggggctcctgaacagcatggaccagcagattcagaacggctcctcgtccaccagtccctataacacagaccacgcgcagaacagcgtcacggcgccctcgccctacgcacagcccagctccaccttcgatgctctctctccatcacccgccatcccctccaacaccgactacccaggcccgcacagtttcgacgtgtccttccagcagtcgagcaccgccaagtcggccacctggacgtattccactgaactgaagaaactctactgccaaattgcaaagacatgccccatccagatcaaggtgatgaccccacctcctcagggagctgttatccgcgccatgcctgtctacaaaaaagctgagcacgtcacggaggtggtgaagcggtgccccaaccatgagctgagccgtgaattcaacgagggacagattgcccctcctagtcatttgattcgagtagaggggaacagccatgcccagtatgtagaagatcccatcacaggaagacagagtgtgctggtaccttatgagccaccccaggttggcactgaattcacgacagtcttgtacaatttcatgtgtaacagcagttgtgttggagggatgaaccgccgtccaattttaatcattgttactctggaaaccagagatgggcaagtcctgggccgacgctgctttgaggcccggatctgtgcttgcccaggaagagacaggaaggcggatgaagatagcatcagaaagcagcaagtttcggacagtacaaagaacggtgatggtacgaagcgcccgtttcgtcagaacacacatggtatccagatgacatccatcaagaaacgaagatccccagatgatgaactgttatacttaccagtgaggggccgtgagacttatgaaatgctgttgaagatcaaagagtccctggaactcatgcagtaccttcctcagcacacaattgaaacgtacaggcaacagcaacagcagcagcaccagcacttacttcagaaacagacctcaatacagtctccatcttcatatggtaacagctccccacctctgaacaaaatgaacagcatgaacaagctgccttctgtgagccagcttatcaaccctcagcagcgcaacgccctcactcctacaaccattcctgatggcatgggagccaacattcccatgatgggcacccacatgccaatggctggagacatgaatggactcagccccacccaggcactccctcccccactctccatgccatccacctcccactgcacacccccacctccgtatcccacagattgcagcattgtcagtttcttagcgaggttgggctgttcatcatgtctggactatttcacgacccaggggctgaccaccatctatcagattgagcattactccatggatgatctggcaagtctgaaaatccctgagcaatttcgacatgcgatctggaagggcatcctggaccaccggcagctccacgaattctcctccccttctcatctcctgcggaccccaagcagtgcctctacagtcagtgtgggctccagtgagacccggggtgagcgtgttattgatgctgtgcgattcaccctccgccagaccatctctttcccaccccgagatgagtggaatgacttcaactttgacatggatgctcgccgcaataagcaacagcgcatcaaagaggagggggagtgagcctcaccatgtgagctcttcctatccctctcctaactgccagccccctaaaagcactcctgcttaatcttcaaagccttctccctagctcctccccttcctcttgtctgatttcttaggggaaggagaagtaagaggctacctcttacctaacatctgacctggcatctaattctgattctggctttaagccttcaaaactatagcttgcagaactgtagctgccatggctaggtagaagtgagcaaaaaagagttgggtgtctccttaagctgcagagatttctcattgacttttataaagcatgttcacccttatagtctaagactatatatataaatgtataaatatacagtatagatttttgggtggggggcattgagtattgtttaaaatgtaatttaaatgaaagaaaattgagttgcacttattgaccattttttaatttacttgttttggatggcttgtctatactccttcccttaaggggtatcatgtatggtgataggtatctagagcttaatgctacatgtgagtgacgatgatgtacagattctttcagttctttggattctaaatacatgccacatcaaacctttgagtagatccatttccattgcttattatgtaggtaagactgtagatatgtattcttttctcagtgttggtatattttatattactgacatttcttctagtgatgatggttcacgttggggtgatttaatccagttataagaagaagttcatgtccaaacgtcctctttagtttttggttgggaatgaggaaaattcttaaaaggcccatagcagccagttcaaaaacacccgacgtcatgtatttgagcatatcagtaacccccttaaatttaataccagataccttatcttacaatattgattgggaaaacatttgctgccattacagaggtattaaaactaaatttcactactagattgactaactcaaatacacatttgctactgttgtaagaattctgattgatttgattgggatgaatgccatctatctagttctaacagtgaagttttactgtctattaatattcagggtaaataggaatcattcagaaatgttgagtctgtactaaacagtaagatatctcaatgaaccataaattcaactttgtaaaaatcttttgaagcatagataatattgtttggtaaatgtttcttttgtttggtaaatgtttcttttaaagaccctcctattctataaaactctgcatgtagaggcttgtttacctttctctctctaaggtttacaataggagtggtgatttgaaaaatataaaattatgagattggttttcctgtggcataaattgcatcactgtatcattttcttttttaaccggtaagagtttcagtttgttggaaagtaactgtgagaacccagtttcccgtccatctcccttagggactacccatagacatgaaaggtccccacagagcaagagataagtctttcatggctgctgttgcttaaaccacttaaacgaagagttcccttgaaactttgggaaaacatgttaatgacaatattccagatctttcagaaatataacacatttttttgcatgcatgcaaatgagctctgaaatcttcccatgcattctggtcaagggctgtcattgcacataagcttccattttaattttaaagtgcaaaagggccagcgtggctctaaaaggtaatgtgtggattgcctctgaaaagtgtgtatatattttgtgtgaaattgcatactttgtattttgattattttttttttcttcttgggatagtgggatttccagaaccacacttgaaacctttttttatcgtttttgtattttcatgaaaataccatttagtaagaataccacatcaaataagaaataatgctacaattttaagaggggagggaagggaaagtttttttttattatttttttaaaattttgtatgttaaagagaatgagtccttgatttcaaagttttgttgtacttaaatggtaataagcactgtaaacttctgcaacaagcatgcagctttgcaaacccattaaggggaagaatgaaagctgttccttggtcctagtaagaagacaaactgcttcccttactttgctgagggtttgaataaacctaggacttccgagctatgtcagtactattcaggtaacactagggccttggaaattcctgtactgtgtctcatggatttggcactagccaaagcgaggcacccttactggcttacctcctcatggcagcctactctccttgagtgtatgagtagccagggtaaggggtaaaaggatagtaagcatagaaaccactagaaagtgggcttaatggagttcttgtggcctcagctcaatgcagttagctgaagaattgaaaagtttttgtttggagacgtttataaacagaaatggaaagcagagttttcattaaatccttttaccttttttttttcttggtaatcccctaaaataacagtatgtgggatattgaatgttaaagggatatttttttctattatttttataattgtacaaaattaagcaaatgttaaaagttttatatgctttattaatgttttcaaaaggtattatacatgtgatacattttttaagcttcagttgcttgtcttctggtactttctgttatgggcttttggggagccagaagccaatctacaatctctttttgtttgccaggacatgcaataaaatttaaaaaataaataaaaactaattaagaaa

SEQ ID NO: 486 - protein, 680 aa, Homo sapiens
MNFETSRCATLQYCPDPYIQRFVETPAHFSWKESYYRSTMSQSTQTNEFLSPEVFQHIWDFLEQPICSVQPIDLNFVDEPSEDGATNKIEISMDCIRMQDSDLSDPMWPQYTNLGLLNSMDQQIQNGSSSTSPYNTDHAQNSVTAPSPYAQPSSTFDALSPSPAIPSNTDYPGPHSFDVSFQQSSTAKSATWTYSTELKKLYCQIAKTCPIQIKVMTPPPQGAVIRAMPVYKKAEHVTEVVKRCPNHELSREFNEGQIAPPSHLIRVEGNSHAQYVEDPITGRQSVLVPYEPPQVGTEFTTVLYNFMCNSSCVGGMNRRPILIIVTLETRDGQVLGRRCFEARICACPGRDRKADEDSIRKQQVSDSTKNGDGTKRPFRQNTHGIQMTSIKKRRSPDDELLYLPVRGRETYEMLLKIKESLELMQYLPQHTIETYRQQQQQQHQHLLQKQTSIQSPSSYGNSSPPLNKMNSMNKLPSVSQLINPQQRNALTPTTIPDGMGANIPMMGTHMPMAGDMNGLSPTQALPPPLSMPSTSHCTPPPPYPTDCSIVSFLARLGCSSCLDYFTTQGLTTIYQIEHYSMDDLASLKIPEQFRHAIWKGILDHRQLHEFSSPSHLLRTPSSASTVSVGSSETRGERVIDAVRFTLRQTISFPPRDEWNDFNFDMDARRNKQQRIKEEGE

SEQ ID NO: 487 - DNA, 103 bp, Homo sapiens
ggaccagatgcccatctgcgtggtgtgcgaccgctcccgcgagcaccgcggccacagcgtgctgccgctcgaggaggcggtggagggcttcaaggagcaaatc

SEQ ID NO: 488 - DNA, 2963 bp, Homo sapiens
acgctgccgccggcatccgctcggacgcggccacgttgtcttgcgcgctttgcccgcctggccctgggactctgaccctcggctaccctttcctgccccactagcgtggccgcgagcctcggtgagccggccgtattcccgctctcgcttagggggcacaggcgcaggcatcggcccggccactccaagccttcggtgcgcgggcgcgtctgggatacgggcccgggaggcgccgccctccgtccgcccggtgcctctcaggaacagcgaaccggagagagcgccggagagttgggctcagtgcagagctcggcgccggggcccatgcccgtgcgcccccgcaggccggcgccatggcctccgggagtgtggccgagtgcctgcagcaggagaccacctgccccgtgtgcctgcagtacttcgcagagcccatgatgctcgactgcggccataacatctgttgcgcgtgcctcgcccgctgctggggcacggcagagactaacgtgtcgtgcccgcagtgccgggagaccttcccgcagaggcacatgcggcccaaccggcacctggccaacgtgacccaactggtaaagcagctgcgcaccgagcggccgtcggggcccggcggcgagatgggcgtgtgcgagaagcaccgcgagcccctgaagctgtactgcgaggaggaccagatgcccatctgcgtggtgtgcgaccgctcccgcgagcaccgcggccacagcgtgctgccgctcgaggaggcggtggagggcttcaaggagcaaatccagaaccagctcgaccatttaaaaagagtgaaagatttaaagaagagacgtcgggcccagggggaacaggcacgagctgaactcttgagcctaacccagatggagagggagaagattgtttgggagtttgagcagctgtatcactccttaaaggagcatgagtatcgcctcctggcccgccttgaggagctagacttggccatctacaatagcatcaatggtgccatcacccagttctcttgcaacatctcccacctcagcagcctgatcgctcagctagaagagaagcagcagcagcccaccagggagctcctgcaggacattggggacacattgagcagggctgaaagaatcaggattcctgaaccttggatcacacctccagatttgcaagagaaaatccacatttttgcccaaaaatgtctattcttgacggagagtctaaagcagttcacagaaaaaatgcagtcagatatggagaaaatccaagaattaagagaggctcagttatactcagtggacgtgactctggacccagacacggcctaccccagcctgatcctctctgataatctgcggcaagtgcggtacagttacctccaacaggacctgcctgacaaccccgagaggttcaatctgtttccctgtgtcttgggctctccatgcttcatcgccgggagacattattgggaggtagaggtgggagataaagccaagtggaccataggtgtctgtgaagactcagtgtgcagaaaaggtggagtaacctcagccccccagaatggattctgggcagtgtctttgtggtatgggaaagaatattgggctcttacctccccaatgactgccctacccctgcggaccccgctccagcgggtggggattttcttggactatgatgctggtgaggtctccttctacaacgtgacagagaggtgtcacaccttcactttctctcatgctaccttttgtgggcctgtccggccctacttcagtctgagttactcgggagggaaaagtgcagctcctctgatcatctgccccatgagtgggatagatgggttttctggccatgttgggaatcatggtcattccatggagacctccccttgaggaggtgaattcaggccaaaagggctgttggctgtaatcctacgccaggcacaaggcatcttgttgccttgccacgtcctgtcacagctgggtatccttaccatgttccacgcccttgcagtgggagacaggatgtccatgttctctaccatccttttccttcccatgcagattgtgaaatgtaatgagatgtatcaagatatcctagaaataaaaaccagatgtccacctccagtgtttcatactttctggttttacacatcgctggagggataaagagtatggataatctttggatttggagagccgttcaagatacttccagcttcttggctcagcctggcttcctctggttcagccccacataatgattatggctatttgctgtcatttctgggctagggctcctttctaacaacctagactggaataaggccctgtcagcatggctccctttatcccagttttccgtctgggaacagtacctctgcccctgattcccaatgtgccatagttttattaactccattaaagaagcctgtatgtgttttggttagttacagttattttacaataatggtgggtaatggccccacctctgttatgagataatgttctaatcaatgtctctgcctttgtatcttttctgagggctttgtctgttctcttcattctaatgaaaggtgtattctagtgctgggtgcatatcatccaggataatattctgcccaactccatcctctgttactagatcccttaccagtcacatttgtggactggtggccagtcgtataccatccctggaaggattctgggacaatattccagggattcattgacttcttggctccttttctccatttcctttgggggaagggggaattgaccatgcttaagtgcatcctatcaaggggcagctccgtccccatggccattggatcatgagacactctgaagtcagaaggctggggcagatcacttcaagcaagcccccatgatggttctcagtcctgcttctctgtgggtacgtgcccctctgtttaaaaataaactgaatatggatgttta

SEQ ID NO: 489 - protein, 513 aa, Homo sapiens
MASGSVAECLQQETTCPVCLQYFAEPMMLDCGHNICCACLARCWGTAETNVSCPQCRETFPQRHMRPNRHLANVTQLVKQLRTERPSGPGGEMGVCEKHREPLKLYCEEDQMPICVVCDRSREHRGHSVLPLEEAVEGFKEQIQNQLDHLKRVKDLKKRRRAQGEQARAELLSLTQMEREKIVWEFEQLYHSLKEHEYRLLARLEELDLAIYNSINGAITQFSCNISHLSSLIAQLEEKQQQPTRELLQDIGDTLSRAERIRIPEPWITPPDLQEKIHIFAQKCLFLTESLKQFTEKMQSDMEKIQELREAQLYSVDVTLDPDTAYPSLILSDNLRQVRYSYLQQDLPDNPERFNLFPCVLGSPCFIAGRHYWEVEVGDKAKWTIGVCEDSVCRKGGVTSAPQNGFWAVSLWYGKEYWALTSPMTALPLRTPLQRVGIFLDYDAGEVSFYNVTERCHTFTFSHATFCGPVRPYFSLSYSGGKSAAPLIICPMSGIDGFSGHVGNHGHSMETSP

SEQ ID NO: 490 - DNA, 107 bp, Homo sapiens
cttactcatcctcttctttgtctacatggacaaggtgaacgagaacgccaagaaggacctgaaggaaggcctgctgctgtaccacaccgagaacaacgtggggctga

SEQ ID NO: 491 - DNA, 4322 bp, Homo sapiens
gtttccgctggcggcggcggcggcggcggtgccggagcgcgagcagagcggagacccccaggtcctgcgggcgcggaatatcctggaaccttcttttgtttgtcagcagccaaggtgtttccaggaagttcagagagaacagaatttaagaagtgcaacatggccaggggctgcctctgctgcttgaagtacatgatgttcctcttcaatttgatattctggctctgtggctgtgggctgctgggagtgggcatctggctctccgtgtcccaaggcaactttgccaccttctcccccagcttcccttcgttgtctgcagccaacctggtcattgccataggcaccattgtcatggtgacgggcttcctcggctgcctgggggccatcaaggaaaacaagtgcctcctcctcagctttttcatcgtcctgttggtcatcctcctagcagagctgatcttactcatcctcttctttgtctacatggacaaggtgaacgagaacgccaagaaggacctgaaggaaggcctgctgctgtaccacaccgagaacaacgtggggctgaagaacgcctggaacatcatccaggctgagatgcgatgctgtggtgtcactgactacacagactggtacccagtgctgggggagaacacggttcccgaccgctgctgcatggagaactcccagggctgcgggcgcaacgccaccacgcctttgtggagaacgggctgctatgaaaaggtgaagatgtggttcgatgacaataagcacgtgctgggcacggtggggatgtgcatcctcatcatgcagatcctgggcatggccttctccatgaccctcttccagcacatccaccggactggtaagaagtacgacgcatgagcgggctggccgggagtgcccaccccgccctgctgccctgtggagggaagaggattgagctttgtgtcacctgcctgcgctctccagatatgacccctgcacccaccccccacagcctgccctaccccacctaccctgcctcagcctcggacttctcagtgggtggagtgccagggaggaggaggcacacggagacctggggctcggggcccctggattcctgcatctgcatatgcgtatttgccaaagacgacagggtgggctggggtgcgctccggaggaacccccggcactgatgggcttctgcccctgcccttcctcacactgacactttgtccccacatggggtggggagcagagtgcccgccccgtggagataccgccccagcgggggctgcgacatccatggccaccatggggcacctggcggggcgggggtctgccggcctctgggcaaggcccctggagcatctcgcccaggctttttataccttacaatgtaacttttttattttattttactctatgattattcaggaatattatctctcagataagtttagggttagatttctgatttgtaactttttactgtgttgatttctttaatggtttgactttttttccctgagggtgagggatgggtgggaagagaggacatctgtccagtctcaatcaggacagaccaccgtgcgacacccaggaggctctcggatggggcgcgcctgcgccctcagaacgtgtgggaaggagggggcgtggacaggacacgggaccttgccaggcctggtgtctgaggacaggagcctgggagaggcgggtggagcgtgaagcaggctggaggtgcccctgcacgggaggtggcgtttgctaaccaatcgagctggaaatgccagggcaggggggccccacggtgctgtggcagagctagaggggtccttagacttttcactgatgagcagttgttggttttttctttctcccttcctcccgctctctgctggcacgcgaggcttccccttccaccccatgtgggtattcccacaacaggttctgcacaccccagttatttcacagacattcctgctagaaactgtcagacaaatacctctctagttcggatgctgctcactttcccccttgcttctggaaggggaagcagtccttaggttttgctgtgctgggacagtggcaggggacccacaggggtgaggacccacggtcctccccgccagccttgctcagctgtgggttgccctgctgggaaggagggaatcacgtccacctgggtcccaagatcttcgcctccttccctggggccacggacatcagcagtgggttgggtggcgattatatcatctgtgatcccaaggagaagaaatacagaaaacccaagagaggtcagactggctcttgttaccggagccacgggaagaaagcagccggagtcacgcacgtgcagagctgggcatgggagagaaacgggctggggagtgaggccaggagtgggattcagctgcagcagggcgccccctccaaactgcagctggtctggcttactgttttgccgttcaaaaaggtcgcgaatccgtgggactgagcacggggacctcacccgctagccagcgtctgctgcacttgatcaggtggggccttggtgggcggctgcctttcctatacagtttgtcttgtcaccctggtttcccactggggccaggtctcttctccagcctccacctgcctgtctgatccaagagctgagacacggccacccagcaccagtcactcctctgttcaccttaagtaacacacaaatcgggaacaggaggacagaaccgttggcattatcaggattcgtgttttgtgggggtgggagtggagagtagggtggtcttgtgagttgtgcagggtgaagaccgcttccctgagacaggggcagtggtgctgatggaatgtgggggaggcccacatttgagcaaagctgccctgcccttgtcccctggcctggcttcctggtaaggagtttcagccgcctccgcaggaacccccaaagtgcagattccggagcagacacatccgggcggagagactcagcagacaagtgctgcagttgcacggtgggacccggggcctcgtgcgttttttgctgtgggtggggtgggtgggttggtttatgcctatcaatgcaatttttaatttttgttaatatcaacagcaaaagcctagtgcattgggagatgtgcaacctccctgaaaatcttttctgtttctggagtacttcaggggtggcctctggccccagagcctttgccacagtgctcccaccagcccccacctcatccgtctgtttgcagagcctcatctacaggtccccacgctgccttctttactcactctgcgcttggccgttttgttatttggcttagtctacattgggcggaagtctgtgtgcacagagtgggtgttccttcgagccccttccactcagagggccacacccagcgatgccagtgaaggtggcacagcctctcttcagtttctcctgactgtgatctcactggggtagaattcccctgagagaattccctcactcacggctccctttgccagagtcagttcaatcaggtctgatgtgagcaatttacacacttgtctcagaaagtccctcagggtttgtagaggactgcaggggggcatccgctgcagactcagcctttctctgcagccatcctgcagtgggggtgagcgggcacaggctgagaactgctcttgggtggtggaagcaggtgtcacggtgcaagtctccccctgcacccctcccccagcttgagccgtgtcacccccctctccctccagcatgggcctgtgtctcaggctctctggaaggtggccctgccccggaccctcttgcaggtgtcctggtttgacttggaactagatggccatctttccaggctttggtggcccaagagcagtctgggtggatggaagtggctgtcccctcctctccagcccctgcccacccactggtggaggtgctaactagcagggacgtggcataggatgggagctgggcgtgaggtgcttggggtccattctttgtccctcagcttctcagagtccggccagcccttgtgttcccgtgccccacactttcctcctccccactgcagtgagtcaatagtccagggtggggcctggcctccctgccctgattggggactcaggaggtgaggcctggggggcttcctgccccctccttgcccacctgcctgcccccgggcagcacgggagggagagcagggtgagcacgcttgttggtttcagatgcactttctgcttgcattgccgtatctgtgcgttccttcatcctggtcctggctttatggaacaccatgtttttagcatgtttttaaataaaaacggataaagtgtcaaaagca

SEQ ID NO: 492 - protein, 239 aa, Homo sapiens
MARGCLCCLKYMMFLFNLIFWLCGCGLLGVGIWLSVSQGNFATFSPSFPSLSAANLVIAIGTIVMVTGFLGCLGAIKENKCLLLSFFIVLLVILLAELILLILFFVYMDKVNENAKKDLKEGLLLYHTENNVGLKNAWNIIQAEMRCCGVTDYTDWYPVLGENTVPDRCCMENSQGCGRNATTPLWRTGCYEKVKMWFDDNKHVLGTVGMCILIMQILGMAFSMTLFQHIHRTGKKYDA

SEQ ID NO: 493 - DNA, 104 bp, Homo sapiens
gtattccaggttgaagagtgctctggctgtagagggtccccacgatctgtcatctagtaactcaccagatacataagatattttgcctgctatgaagccattgg

SEQ ID NO: 494 - DNA, 1628 bp, Homo sapiens
agggcagtgaacctaagccaggagctgcttaggcattaaggcttctatacccagaatcgtgtgctaagctttctctccaagtcagcacaacaaagcaaaccagagcatcgtaccaacaacctgaaaggtcacctgactccttccttctcactcccattctgtacttctgcatacgtgggcaggcaagtgaatggtaagtaagcctgcaaacagcctttctttgtatagggaatgacaggcatttcatcagcaactccaggatggcaggccgttatcctgaaacctatcagaacagctcctgcttggcttccaaaatatcacaattttggaaatgtacaaaggttagttttcacagtccttgaagcctctttccaccctggccatagcccatgtcagcagtaacctatgtctttgttttacatatcatgttgttttactcacctggtgcctccagtgccctatagggtccctgagctgtcctgatactctttcttagatcctgtcaaaacactcacttcaacaaattctgcccttggactctgatgggaggttctgataaagaaaattattgaaaaccgcattatttaaatgtggttatatttcagctggacctggaaataaagacgaaatactgcttcgtgactgtgctttaaggaatttttgcttctaggagatgattgtgagccaggcagaggtgaaggagcaggagcaaatagccaaggcacagttcacagtgctggattttcttgtggatatagctgcattgttgttccttctgccttgtccaactgcttcctggtatccctaccctcaccttttcgttatcttttcatctctctaatcattgagaaaaagagtacaaaaagccagattttgcagttccctattttgtattccaggttgaagagtgctctggctgtagagggtccccacgatctgtcatctagtaactcaccagatacataagatattttgcctgctatgaagccattggagaatcaggtccagctgtgtcctacagatttataccctcactttggatgcactgtgaatcttgaaacaattcattttatacttaaccctttaagtataaagtatatacttcaagtataaagtgtaaggttgcttcatttcatgggcccacccaggatttaaaggtgtattccctgaaagaattggttccttccggtgggttcctggctgacttcaagaatgaagctgcagacacttatggactgggaggaggcccacgagaaaaacaggaagaacaagagaaaggctgaggctctagtggctgctttgcagacttgcagagtccaggatcccccaggaacttccactgattgctacctgttaccagtgttaaagccagggcactttaagaagaattgcccaagccacaagaaaaagccaccttgaccacttttgtggtgaagaccactggagattgcactactgaccaccaagacagagacacaatagcgaatctagaagtggaagtgtgagagatacctgcagctgttaagatgtctgggaatagacacacaaactctctctcccagataagcaacacaaagcagcacagagcaacagagactgaaagtctgcctacctgatcagggaataag

SEQ ID NO: 495 - skipped

SEQ ID NO: 496 - DNA, 97 bp, Homo sapiens
gcctttgcagtgactcaagaaaaactcatcacctggagtccgtgtaagctcggcgacagccctagcagcgaggccaaaacagtttgggaagaaagaa

SEQ ID NO: 497 - DNA, 5262 bp, Homo sapiens
gcgccatattgaagaggacgggtctaatagatcgctggagacacaatttaactgaaccccgcccgttgtggactgactttgatgctctgagtccctccctccttcacgccgctagcaggccctgatgtagattgcctttgtcttacttgggacgtttacctgagcgcttggtgctggtgtcgggaccgggagataggagtgtctcaggagagacctggccgaaaaccgcgagaaagaaaagtgaagcctagtgaaactgcctttgcagtgactcaagaaaaactcatcacctggagtccgtgtaagctcggcgacagccctagcagcgaggccaaaacagtttgggaagaaagaaaacctaaagtatttgccgttggtgattcaagggaatcaaacttgacgtatggagccaagaaagcccttggaaaaactggcctcatattttgtgtacacagtccctgtacagggtttctgacctgtgagtcactgaaaactaagctgcgctttcctaaagtcctgcgaactgaagccagacaacttaaacctcagaagaaaataacagcaacctatttatatacataagccactttcatacctgcctactgttgtatagacttcagagtaatgtggcctgtatcgattttccaggagtattcttttgtgtgttgttttttctcaattcctcctattttctctttacaggatgtgagacttcacaacctgctaaaaatgagctttcaggacctacccatataggaataaaccatcctagccatgagagatcagatgaaacctgagaccagagagactcatttgtttcaaaatagtttctccaaaagattttataaaagaaaaggctggggggagtgggatatgaaaggaaaatgaatcttggggcccccaaatcactaagctcaagggataagtcaagttagaaactgttcagggccaacttaccttgcattctattcaaattcacccctctgctcacttagatgcatatctgattgtaatcagaaactcaaaagaatgcagcagtttgtctctcacctatctatgacctggaagcccccttccccgtttgagtcttcctgcctttgcttcactttatccctgcctttctagactgaaccaacatacttcttagatatattgattgatgtctcatgtctccctaaaatgtataaaactaagctgggccccaaccaccttgggcacatgtcgttaggacttcctgagactgtgtcacaagtttgtgtccacaactttgacaaaataaactttttaaattaactgagacctgtcctaaatttttagggttccatcagatatgcatttctctcacctgagcatcagagggatgatttcgagttctctgtgttttttgtccacaggaatttccttgtgggcaaattctgagggagggatgtagcttttttatgtttggagctattttatttagaaataaaatgggaggcaggtttgcctgagtcagttgcctgcttgacttcctttggcttagtcattttggagtcctgagatttattttcttttcacatacctgttttatttatgatggtttatggtcattgaaccttgtaacattgattacatttcttttcactggtcttttttcttaagtagataaacttatttttaacttgggcacaagagagcataaaaattatatgaggtacatagcctgcttaaatagaatatttaaaatacgttttgtccacagagctggaattctttgtaaatgaaaaccaaattttacttaatttttagagatgggatcttggctttgtcgcctaggctagagtgctgtgggggcaatcatagcccactgcaacctcgaattcctggcttaagtgatcctcccatctcagcctcctgggtgcttggacaacagacatgacaccttacctggctagttaaaaaaaattttttttgtagagatgggctttgcctgtgtggcccaggctgctcttgaactcctaggttcaagtgatcctccagcttgggccttccgaagtgctgggattacattgcttccagctttagttttttaaatgtttaacttgtttaacttatttaacttgctgtttattatttaatggagagcttttagtgtttgtcttttgaggtgggatcttgccatgcccagactagccttgaagtcctacagtcaagtgatctttgcatctcagtctcccaagaagtagtggtagagaatttttatgttacattcctttctctgtgtatatgtttgtgggaggacatatgtccctttgtatgtttgggcatatatattttttgtgtgaaagttatgcatgttattgttgatcaatacaagaggtttagaggccagagaagagaaataaaatgggaaaaactacaaacattctacctcccatgataccatgctataatggcaatcataatatttatgtattttttacttttttgtgttcatttttaaaaattagataaaaatagtttaagctagaggcttctctctttcatctttttttttctaatttaagttttccctaagtaggaattttggtaatacttcattatattgatgtatcaagatttctttagtttctcctttgttgtctttaggttgtctacaatattttttgtcattgtgaatatgctgtcatgaacattttgatgctgattattaccagattagtgtgttgtgtcaaagttttcatcagttggattatttttcagtttagtaagtgatgcaagccaaaactaaaactctaaggcaccttctccccacccaaccagtcatctgagtagacttcctcctcagccagggcagtcatagcccactgcaaccagccagcccctttccattccagtatccctttccctttaataaaatttaaggccaaacatggtggttcaatgcctgtaatgccagcactttgggaggctgaggtgggcggatcatgaggtcaggagataaagaccattctgggaaacatggtgaaacactgtctctactaaaagtataaaaattagctggatgtggtggcatgtggctgtggtctcagctactcgggaggctgctgaggcaggagaatcgcttgaacctggggaggcagaggttgcagtgagcagagatcatgccactacactttagtctggtgacagaatgagactccatctcaaaaaaaaaaaaatgatttgtgagatgaatttgttttgaaaatattagcttgttttcagttgtgatacatttgaagttggtacagagtccattttcttttatgtgttaatgtattgacaatatagttgtgttgacaacttcttttcttatttccagttcagtctttacagaagctgacgagagatttccttgtattttatggtggtatgattggccttagagcacttcagttttgagatctctgctgtatttgtatacaagtattttggaaggtcagttgataggatgaatgaaaaacaaaaattggaagtaatggtactagtaataagtggggattttcatgtaggtaaaggaactgataagtcatagggaatccgtgagttcttaatcttactgagtttagttgtgttctttgattattttggatagctttgtttaacggtgaatgaaatgattaaaatggaaaaattaagtgcagaaaatatgtttaacattatataggatgtcttgttttaggcatttattgctagataacatatgtccattcttgtattgctataaagaaatattggatactggctaatttataaataaaagagatttattggctcatgattctgcaggctgtacaggaaatatgattctggaatccgcttggcttctggaaaggcctcaggaaacttagaatgatgacacaaggcagaggggaagcaggcacatcttacatggcaggagcagggagcaagaaagagtgaagcgggaggtgctacacacttttaataatccagatctgagtcaggcatagcagcttatgcctataatcccagcacttttgggaggccaaggcaggcagatcacctgagggtcaggagttcaaggccagcctggccaacatggtgaaacctcatgtctactaaaagtacaaaaattagctgggtgtggttgcacctgcttataatcccagctgctcaggaggctgaggcaggagaattgcttgaacccgggaggcagatgtttcagtgaaccaagattgcaccactgcactccagcctgggtgaacagagtaagactctgccttaaaagtaaaataaaattaaattaaaattaaaaaccagatcttgcaagaactcactgtcagaagaacagcaccaagggtatggtgctgaaccattcatgaaggagccatcctcaagatccagtcatctcataccaggtccacctccatctaatattgggaattacaattcatcatgagggttggtggagacatggatccaagccatgtcacatattatcctgactgtagtggtttaagataacaatttttatctcacaatttattttgaatacaggcatgatttagctgtgtcctttggttcagtatctcttcaaagctgtaatcaggtttttcatgtgtttgtcatcaactgaaagattgactgagtatggttctgagatctctcaggtgattattggcagaattaagttccttttcgattcttggtcttatttcttcacccatctactatagtgcattcttgccatgcagccctttttatggagcaagtcacaatacagcagcttgcttcattagggcaagcaagcaagacaagctgcagcaaatgcaagtaacatggaagtctttataatctaatcatggaattgacatagttaaaaacaaatcattaggtaggctccaaattgatcagaacatggttattggacaaaaccatgactgtcaggaggctgcatcatggggagccattttacaagcagcaccatgggtgttatgggggattttattacatttgttctgctcttaagagttgaaagtctttaaaaatgtgtaagtctgtcgtttgttcttgacttctgtcatgttttcaagaatgcattatgcaatgatgtagaatactgtttgtaaagtagttgtctagactctagtgaaaataattacagataatctcagttcatcaacgaatcggtatattaatgtcatatttaacagttataggaataaactaagcataataataaatgatgatttgaatgttaaaaaaaaaaaaaaaaaaaaa

SEQ ID NO: 498 - skipped

SEQ ID NO: 499 - DNA, 104 bp, Homo sapiens
tcgtggaggatgtgcgggacgagtgcagcaagtacgggcttgtcaagtccatcgagatcccccggcctgtggacggcgtcgaggtgcccggctgcggaaagatc

SEQ ID NO: 500 - DNA, 3148 bp, Homo sapiens
ggagagcgcgccacagaacgacttttacgcaggcgcagaagcctgtttcccctcacccgcggcttccaccctgcgcaggcgcaaaaagccgcgctggcaacctccgcagcggtcgcgcgcacccttcacccctcttgctgcttttgtctggcacaaccttctcaggccctccgcgaggccggccctttttttctttcactttccccacccggagagccaggtgccgagaactaggacctcgtccccttctctatcccttcccctgatccatctcgtctctgttctccttcccttttccgttcccgaagccggaaggagccgaggtacccacggaaaaagtcgaagctgtccccggagagtgaggccttcacgaagcggtggcggaaggagccgaagttctctgatcggaggcgtgagcaagtggcatctccggaaagagccgaaacacggactcgagcttaatcccaggaggggcccgagggcgagatccggaaatctccggaaagagccgaaggccgggacggttaggattgtcggaagtggccgattgcttggacagggccggcggagaagatcggagcaagtccgtggaagaagccaaagactgggacggattgaattgttggaagaacccgaactcgcagaggggactgggcgcagtggcacacgaggacacacggaaacctccgaacgttgaggagataatctcggaaaagttacggaaacctgggaagtcggcgaaaccctacgttcgggtgttttcggaagcagccgaagcggccgcctgcttcgccttcgtccagtatccggagatagccgaggcgcttcggagccaggctcggggggaggggcaagctcgcgggcgggcgggcgggtgagggggcggagcccgggcggggcggggagggctgccggaggcttgattaggtaggaggtggcgaagcgccggcggcggccggaagtagccgaagccagcggcggaagtagccgaagcggctggagcgggcggcaaggcgaggcgaaagctgcacagggccctacgcggccgcctcagcatgtcggacttcgacgagttcgagcggcagctcaacgagaataaacaagagcgggacaaggagaaccggcatcggaagcgcagccacagccgctctcggagccgggaccgcaaacgccggagccggagccgcgaccggcgcaaccgggaccagcggagcgcctcccgggacaggcgacgacgcagcaaacctttgaccagaggcgctaaagaggagcacggtggactgattcgttccccccgccacgagaagaagaagaaggtccgtaaatactgggacgtgccacccccaggctttgagcacatcaccccaatgcagtacaaggccatgcaagctgcgggtcagattccagccactgctcttctccccaccatgacccctgacggtctggctgtgaccccaacgccggtgcccgtggtcgggagccagatgaccagacaagcccggcgcctctacgtgggcaacatcccctttggcatcactgaggaggccatgatggatttcttcaacgcccagatgcgcctgggggggctgacccaggcccctggcaacccagtgttggctgtgcagattaaccaggacaagaattttgcctttttggagttccgctcagtggacgagactacccaggctatggcctttgatggcatcatcttccagggccagtcactaaagatccgcaggcctcacgactaccagccgcttcctggcatgtcagagaacccctccgtctatgtgcctggggttgtgtccactgtggtccccgactctgcccacaagctgttcatcgggggcttacccaactacctgaacgatgaccaggtcaaagagctgctgacatcctttgggcccctcaaggccttcaacctggtcaaggacagtgccacggggctctccaagggctacgccttctgtgagtacgtggacatcaacgtcacggatcaggccattgcggggctgaacggcatgcagctgggggataagaagctgctggtccagagggcgagtgtgggagccaagaatgccacgctggtgagccccccgagcaccatcaatcagacgcctgtgaccctgcaagtgccgggcttgatgagctcccaggtgcagatgggcggccacccgactgaggtcctgtgcctcatgaacatggtgctgcctgaggagctgctggacgacgaggagtatgaggagatcgtggaggatgtgcgggacgagtgcagcaagtacgggcttgtcaagtccatcgagatcccccggcctgtggacggcgtcgaggtgcccggctgcggaaagatctttgtggagttcacctctgtgtttgactgccagaaagccatgcagggcctgacgggccgcaagttcgccaacagagtggttgtcacaaaatactgtgaccccgactcttatcaccgccgggacttctggtagaggcggctgggggagggtgggggcagggctggctgggggcttctccccactcccgccccccccttatccccctctgaagacgatgggcagaggagtgacagccgcagacacacgacagccggcagcaactggaatggcagcaattaagggtggggggcgggggttggggggttggggggttagggcagggaggggactggggaagtgcgcacacagcccacacagacaacacgcacccacacagacacagagggaaggggttgggatggggacagggtgcacagcagggcggggtaggaccccagcccctcccaaaacagcctctccttctcccatagacccctttcttctccccttccccacggtaggaacatagcgtgtttatattttatggccaaactattttgaattttgttgtccggccctcagtgccctgccctctcccttaccaggaccacagctctgttccttcggcctctggtcctctctggtcccctcctgggtttcttacgtagttgatttttcctctttagtctcccccgacctgcgcccagccccgtggcccctgcccctctcctactctctgtggcagtttcatatttgctaagacgaatttgctcattaaacattttgttgtattttactttaaaaaaaaaaaaaaaaaa

SEQ ID NO: 501 - protein, 475 aa, Homo sapiens
MSDFDEFERQLNENKQERDKENRHRKRSHSRSRSRDRKRRSRSRDRRNRDQRSASRDRRRRSKPLTRGAKEEHGGLIRSPRHEKKKKVRKYWDVPPPGFEHITPMQYKAMQAAGQIPATALLPTMTPDGLAVTPTPVPVVGSQMTRQARRLYVGNIPFGITEEAMMDFFNAQMRLGGLTQAPGNPVLAVQINQDKNFAFLEFRSVDETTQAMAFDGIIFQGQSLKIRRPHDYQPLPGMSENPSVYVPGVVSTVVPDSAHKLFIGGLPNYLNDDQVKELLTSFGPLKAFNLVKDSATGLSKGYAFCEYVDINVTDQAIAGLNGMQLGDKKLLVQRASVGAKNATLVSPPSTINQTPVTLQVPGLMSSQVQMGGHPTEVLCLMNMVLPEELLDDEEYEEIVEDVRDECSKYGLVKSIEIPRPVDGVEVPGCGKIFVEFTSVFDCQKAMQGLTGRKFANRVVVTKYCDPDSYHRRDFW

SEQ ID NO: 502 - DNA, 108 bp, Homo sapiens
tggtttctctccctctccaagcatctgtaagttgcactcaggagggtttaggggagggccatgggcaggctggtctcgtgatagtgagtgagtgctcatgggatctgg

SEQ ID NO: 503 - DNA, 1633 bp, Homo sapiens
cctggcagtggggctggatactggcctgcctcccaccagagtccccccagctcctccctgctgtgggctggcctgggaggaagggggtggggtgcacttacatttgcaggtctttccagcccctggggcagcctgattaaccagcttctccagggccaagctgttgggggtgaggtgcagcccgaagcagccagaccagcccctgagcctcccgggtgctggcagctgtcatggggctaccctgggggcagcctcacctagggctgcagatgctcctcctggcattgaactgtctccggcccagcctgagcctgggtgagtgggggtcctggatggacgcgtccagccagacccaaggggctgggggccctgctggagtgattggaccctgggcgcccgcccccctccgattgggagaggcagccccagggacccccacgcccgtctccgtggctcaccttttgtcccccgtggccacagagctggtgccctacacaccacagataacagcttgggacctggaagggaaggtcacagccaccaccttctccctggagcagccgcgctgtgtcttcgatgggcttgccagcgccagcgataccgtctggctcgtggtggccttcagcaatgcctccaggggcttccagaacccggagacactggctgacattccggcctccccacagctgctgaccgatggccactacatgacgctgcccctgtctccggaccagctgccctgtggcgaccccatggcgggcagcggaggcgcccccgtgctgcgggtgggccatgaccacggctgccaccagcagcccttctgcaacgcgcccctccctggccctggaccctatcgggaagacccccggatccatcgacacctggccagggcggcgaagtggcagcatgatcgtcattacctccatcctctcttctctggccggcctcctactcttggccttcttggcagcctctaccatgcgcttctccagcctgtggtggccggaggaggccccggagcagctgcggatcggctccttcatgggcaagcgctacatgacccaccacatcccacccagcgaggccgccacactgccggtgggctgcaagcctggcctggaccccctccccagcctcagcccctagcctggcctctttgcatggggctgggggagatggggcgccgggagtgagtgcatggtgctttgtcccagctcctgcacccacaggccccctcagggctccttgcctttcccccccaccagcacaccccgtaccctgcctggaatcccagcaccagcccccctgcctctcctctgcctttctggtttctctccctctccaagcatctgtaagttgcactcaggagggtttaggggagggccatgggcaggctggtctcgtgatagtgagtgagtgctcatgggatctggttgtttagaagcatgcagcacctcctgcttcactctctctgtctctcctgctccaccatggccagaaacgtgcctgcttccccttcgccttctgccgtgattgtcagtttcttgagggctccccagccatgcttcctgtacagcctgcaaaactgtgagtcaattaaacctcttttcttcataaaaaaaaaaaaaaaaaa

SEQ ID NO: 504 - protein, 320 aa, Homo sapiens
MGLPWGQPHLGLQMLLLALNCLRPSLSLGEWGSWMDASSQTQGAGGPAGVIGPWAPAPLRLGEAAPGTPTPVSVAHLLSPVATELVPYTPQITAWDLEGKVTATTFSLEQPRCVFDGLASASDTVWLVVAFSNASRGFQNPETLADIPASPQLLTDGHYMTLPLSPDQLPCGDPMAGSGGAPVLRVGHDHGCHQQPFCNAPLPGPGPYREDPRIHRHLARAAKWQHDRHYLHPLFSGRPPTLGLLGSLYHALLQPVVAGGGPGAAADRLLHGQALHDPPHPTQRGRHTAGGLQAWPGPPPQPQPLAWPLCMGLGEMGRRE

SEQ ID NO: 505 - DNA, 105 bp, Homo sapiens
ctgtgaggaacatcaccctgatgaaattgacaccgactctgcctacattcttttctatgagcagcagaggatagactacgcacaatttctgccaaagattgatgg

SEQ ID NO: 506 - DNA, 4859 bp, Homo sapiens
gtttataacagcatttgacagcctcgtgactctcacatagggaaaaagtctcgcctgaaaacccatgctaagctgcgtgtcttgagctgtgccaatttgtattccaggcagcctaaggttcccatcgtgagtttcaggaagggaaattcatggaggaagttcacctctggaagggtgaggagcaataaatagggtgggtgatggacatatgtgacgtttgccacagagaggcagtcagtatgggccttgtggtccgggctctgctttgggacacaaatataaactgtgtgaagtcttatggtagcattcataaccctgatgcttcacccaccttcccatacattagagggacaaacagaaggatcccagctctatggttcttgattgtttgtcaggtagcagccaggcatggagagggaaaaattctttcttttctgctgcactctagatccttccttctctcctccttcttcattctacaccacccccaacacatatccctgcaccccgcccattctttgctctctctcctttcttacacttaactccttcttgctccacagcctaacatgctgattaacaggaccccaaaggtttgggtgggtattaggggccttctcaacaaaagcagcacactcttgagcttgttcttccttttgttgccatctcagataaaaaggccccatgagggaggagacagataagtatagacttggtattctgataactctgtgttacatgggatcagatgtaaatgagttgtaccctgtggtgtttcatgctctgctgtgttgtcttctcatggtgagcttttctgtgcccttatttcatccagctctggtttctgtgtttcatgttatttctcctagcctctgtaaactctgcagcatactaataatgctctggctttctgattaaagataaatggcttactatcatcacccctggcttgagggccagctcacatgtaatcccttataggattccaaagttgttaaataaatgcagttctttttgtcattttgaagcattcaaaaatttttcaagaaaagctatgatcatataaatagaaattttatccagaatgttacagtgtagcatttgtgaataaatgtgtaggtgctgtatttgctcagactctagtttgggttgtgttttcttttccctttttttttttgagacagggtctctctctgtcatctgggctgcagtgcagtggtataatcacagctcactgcaacctctactcccaggctcaagcaatcctcctgagtagctgggactagagacatgcgccacaacgcccagctaatttttaggtttttctttcacatagacagggtctcactctgttggccaggctggtttcgaactcctggactcaagcaattccccccacctcagcctcctaaagtgctgggattacaggcctgagccaccatacccagcaagttatattttctttttccttatatagagtaaaataagggtgagtgaccgagaggttgatgcatagctagatcaccagtttaaatgccttcccacacacccctttcctcctgttccctccacctacaggttgtagatgagcatgagagtgtggagcagagttggcgagtgcaagtcgagcccatcaacctggacagctgtctccgtgctttcaccagtgaggaagagctaggggaagatgagatatactactgttccaagtgtaagacccactgctttagcaacaaagaagctggatctctggaggcttccacccttcctgattattcaccttaagcgatttcaatttgtaaatgatcagtggataaaatcacagaaaattgtcaaatttcctcgggaaagttttgatccgagtgcttttttggtaccacgagacccggctctctgccagcatcaaccactcacaccccagggggatgagctctccaagcccaggattctggcaagagaggtgaagaaagtggatgtgcagagtttggctggggaagaggacatgctcctgagcaaaagcccatcctcactcagcgctaacatcagcagcagcccaaaaggttctccttcttcatcaagaaaaagtggaaccagctgtccctccagcaaaaacagcagccctaatagctgcccacggactttggggaggagcaaagggaggctccggctgccccagattggcagcaaaaataaactgtcaagtagtaagaagaacttggatgccagcaaagagaatggggctgggcagatctgtgagctggctgatgccttgagctgagggcatatgcgggggggcagccaaccagagctggtcactcctcaggaccacgaggtagctttgggcaatggattcctttatgagcatgaagcatatggcaatggctacagcaatggtcagcttggaaaccacagtgaagaagacagcactgatgaccaaagagaagacactcatattaagcctatttataatctatatgcaatttcatgccattcaggaattctgagtgggggccattacgtcacttatgccaaaaacccaaactgcaagtggtactgctacaatggcagcatctgtgaggaacatcaccctgatgaaattgacaccgactctgcctacattcttttctatgagcagcagaggatagactacgcacaatttctgccaaagattgatggcaaaaagatggcagacacaagcagtatggatgaagactttgagtctgattacgaaaagtactgtgtgttacagtaaagctaccactctggctgctagatagcttggtggggagggagatgactccttgtagctgatacttggcaaaagtgtcactgagaggcaagctaaatgtagttattttatcctgttagaatacaaattctaattaaaatagttaactttaagagtagtagtaattttattttgaagtctcatgcaagttgtctgatagagaactttcaggcagatcccaccattagcctgtaaacaaaaagtttggcaccagccacctgggaccaaataagaattcaattgtgcttgtccagatatgaacaaatatgtagtgagtatagagtttatcaataatcataacaaatattaaagatttccttggagtcaaagtaaaaaacaaaaaattgtaatgttgtctagggatgacatgatatgctacctcctttttcctgaagttttattccattctgttgacaagatggagaaagcaagatcatgaaggtgtgcaaatgattcttacggcatgggcgaggatttttcaatttattttttaaagtttccataccctttctttgtctttcttgctttttgtttttgccgttgtgtttatgtttgagatacaaccagtcattggtggcaggggcatagagtggtcagtctgaaagggaggctctcttaagagctatgtgccttccacccagagggagacccagtagaaagaaaaacatcctgggaaatccagctaccatggccctcccagtggaggcatcttacatttaggatacttcaggtatcctcagaaatgtattctgcaccccccggccccgcccatgctgagggaaggggagcagttgccaatatttgcaccatcttcacatgcacatgttgcaacaagagcttctgggaaggtaagcggcatcggagctagatcacgtttcacaattagtggtggttcttttccatgtttgttttgcactttaaaaaagagagaacacatgcaaatgaacttgcttgtgtgtatttgatggctccaagggctataaattacaaacaaaacacatcccagacattaggagttcataagtatatttaatgaaattggtggttttaggaagtcaactttagttttgctttgtttgcatgtccactaatttttttattttgatattagtcttttttaaaaaattttacagtagtcattgaaagttatgtttctttgtttacttcattttttcctctaaatattcaagactgggacaaaagtataaatattatttatttcaggtagaatttttttggtgtagttttttaatatatacttgaaggaaatgtttcaccttatttttggtctttgtttattcatttagaccctgcaagttgattctcattaattgtcagattccactacactttcttcctcataggtagtaattaccagtgtaactaagcatttgtgttctgatatctgaggccagtaactattaatatctagttctcagagcatttggaaaggttatcttaaatggctacctaaattgaaatccttttcagaaaaaatataattgcaaataggtaggagtggcctaaattatctaatgtaataaagtcagacaaaatgcatactttatagttcaagattttcggtatataaaatctgtcctttcctacctggacatgtcccattaaaaagtggaagattttaaataatttctttacagatgttttatttaagcaggtagcacaatctactaatgttgtttgatctgtgtttgttatactggttgtaattaatttttttaattcatgaactagcggaaaatttattaaattaactattaaccacattcaccttgtaaatgactgtataaaacttgttgacaatgcactgactttagaaagatgttaatgtgcataaatagagtgtaaataaaatagtgttgatgtactgaaatatgaactgtataaaaagtattagtaattgtatatggggtgtacctgtttatctgtaactgttatccaaacaaattaaatactgtggatgcctttaaaaaaaaaaaaaaaaaaaaaaaaaaaaaaaaaaaaaaaaaaaaaaaaaaaaaaaaaaaaaaaaaaaaaaaaaaaaaaaaaaaaa

SEQ ID NO: 507 - skipped

SEQ ID NO: 508 - DNA, 106 bp, Homo sapiens
aattatgcttacaatggcaatattaacatacccaatgctgaagttcttcttgtcagtgaaattgattggctcaaaaggattagggataatgttaaaaacacaggtg

SEQ ID NO: 509 - DNA, 10036 bp, Homo sapiens
tgaataattgaactttgtttatttctccatatttttgcagtggtaattccattataaaacctaatgaaacaatgtttttatagatggtgtggaaagacttttctgggctcagaggtgaaactgacccttgtgtatcagcagcatttctgactgactgagagagtgtagtgattaacagagttgtgatgttagttaagaaacttagatttgccattgtagcttttctaccaattagcagattgtttaactcactgaaattgtaaagtggtagacgtggacttagtcattactgggcagcttatgaattgtattcatttactcatgatgtaaaaatggttagtctccacttttaaggctctagttctagtggctaaataggtacttatttatacagtatgataactgctgtattaaaatacatgtctcaaatgtggaatagtagaagaggtgaagaaaatcatagtttgaggtagaatactgtttgctggtcttaaaaactgtggtattttggtgattccataaattaggtcagatacttccactggagggaaacagtttaaaggatatatgtgatactattaatagaatgaggaagacacaccagatatttaggagggaattagcgagcttgaaactaagagctggtttgaatgagactgggtcataagtgatttcaagtaccagattaaggcactgagattttatttttaagcactgaagtcagattttttccttttaaaagaaaggattcatgatgaaatctgctttttgttttgcagagagcttggagataattctggtggctgtgtggagtatgtgttggaggtattaaattttcacagtatatataaggcagcaattgataggcctttcacagattcttctgataactacataaagagacaaaaaaaagaaaaaagagcaaagatctgtgctgtgtcaagtatgacagccatcactcatggctctccagtaggagggaacgacagccagggccaggttcttgatggccagtctcagcatctcttccaacagaaccagacttcatcacctgattcttccaatgagaattccgtagcaactcctcctccagaggaacaagggcaaggtgatgccccaccacagcatgaagatgaagagcctgcatttccacatactgagctggcaaacctggatgacatgatcaacaggcctcgatgggtggttcctgttttgccaaaaggggaattagaagtgcttttagaagctgctattgatcttagtgtaaaaggccttgatgttaaaagtgaagcatgccaacgtttttttcgagatggactaacaatatctttcactaaaattcttatggatgaggctgtgagtggctggaagtttgaaattcatagatgtattattaacaatactcatcgcctagtggagctttgtgtggccaagttgtcccaagattggtttccacttctagaacttctcgccatggccttaaatcctcactgcaagtttcatatctacaatggtacacgtccgtgtgaattaatttcctcaaatgctcagttgcctgaagatgaattatttgctcgttcttcagatcctcgatcaccaaaaggttggctagtggatctcatcaataaatttggcacattaaatgggttccagattttgcatgatcgtttttttaatggatcagcattaaatattcaaataattgcagctcttattaaaccatttggacaatgctatgagtttctcagtcaacatacactgaaaaagtacttcattccagttatagaaatagttccacatttattggaaaacttaactgatgaagaactgaaaaaggaggcaaagaatgaagccaaaaatgatgccctttcaatgattattaaatctttgaagaacttagcttcaagaatttcaggacaagatgagactataaaaaatttggaaatttttaggttaaagatgatactcagattgttgcaaatttcctcttttaatggaaagatgaatgcactgaatgaaataaataaggttatatctagtgtatcatattatactcatcggcatagtaatcctgaggaggaagaatggctgacagctgagcgaatggcagaatggatacagcaaaataatatcttatccatagtcttgcaagacagtcttcatcaaccacaatatgtagaaaagctagagaaaattcttcgttttgtgattaaagaaaaggctcttacattacaggaccttgataatatctgggcagcacaggcaggaaaacatgaagccattgtgaagaatgtacatgatctgctagcaaagttggcttgggatttttctcctggacaacttgatcatctttttgattgctttaaggcaagttggacaaatgcaagtaaaaagcaacgtgaaaagctccttgagttgatacgccgtcttgcagaagatgataaagatggtgtgatggcacacaaagtgttgaaccttctttggaacctggctcagagtgatgatgtgcctgtagacatcatggaccttgctcttagtgcccacataaaaatactagattatagttgttcccaggatcgagatgcacagaagatccagtggatagatcactttatagaagaacttcgcacaaatgacaagtgggtaattcctgctctgaaacaaataagagaaatttgtagtttgtttggtgaagcatctcaaaatttgagtcaaactcagcgaagtccccacatattttatcgccatgatttaatcaaccagcttcaacaaaatcatgctttagttactttggtagcagaaaaccttgcaacctacatgaatagcatcagattgtatgctggagatcatgaagactatgatccacaaacagtgaggcttggaagtcgatacagtcatgttcaagaagttcaagaacgactaaacttccttagatttttactgaaggatggccaactgtggctctgtgctcctcaggcaaaacaaatatggaagtgcttagcagaaaatgcagtttatctttgtgatcgtgaagcctgttttaagtggtattccaagttaatgggggatgaaccagacttggatcctgatattaataaggacttctttgaaagtaatgtacttcagcttgatccttcccttttaactgaaaatggaatgaaatgctttgaaagatttttcaaagctgtcaattgtcgagaaaggaaactaatagcaaaaagaagatcctatatgatggatgatttggaattaattggactagactacctttggagggttgtgattcagagtagtgacgagattgctaacagagctatagatcttcttaaagagatatacacaaaccttggcccaagattaaaagccaatcaggtggttatccatgaagacttcattcagtcttgctttgatcgtttaaaagcatcatatgatacactgtgtgtttttgatggtgacaaaaacagcattaattgtgcaagacaagaagccattcgaatggttagagtattaactgttataaaagagtacattaatgaatgtgacagtgattatcacaaggaaagaatgattctacctatgtcgagagcatttcgtggcaaacacctctctcttatagttcggtttccaaaccagggcagacaggttgatgagttggatatatggtctcatacgaatgacacaattggttcagtacggcgatgtattgttaatcgtattaaagccaatgtagcccacaaaaaaattgaactttttgtgggtggtgagctgatagattctgaagatgacagaaagctaattggacaattaaacttaaaagataaatctctaattacagccaaacttacacaaataaatttcaatatgccatcaagtcctgatagctcttccgattcctcaactgcatctcctggaaaccaccgtaatcattacaatgatggtcccaatctagaggtggaaagttgtttgcctggggtgataatgtcagtgcatcccagatacatctctttcctttggcaagttgcagacttaggtagcaacctgaatatgccacctcttagagatggagcaagagtacttatgaaacttatgccaccagatagaacagctgtagaaaaattacgagctgtttgtttggaccatgcaaaacttggagaaggcaaacttagtccaccccttgactctcttttctttggtccttctgcctcccaagttctatacctaacagaggtagtttatgccttgttaatgcctgctggtgtgcctctaactgatgggtcctctgactttcaagttcacttcttgaaaagtggtggcttacctcttgtactgagtatgctaataagaaataacttcttgccaaatacagatatggaaactcgaaggggtgcttatttaaatgctcttaaaatagccaaactgttgttaactgcgattggctatggccatgttcgagctgtagcagaagcttgtcagccagttgtagatggtacagaccccataacacagattaaccaagttactcatgatcaagcagtggtgctacaaagtgcccttcagagcattcctaatccctcatccgagtgcgtacttagaaatgagtccatacttcttgctcaggaaatatctaatgaggcttcaagatatatgcctgatatttgtgtaattagggctatacagaaaattatctgggcatcagcatgtggggcattaggactagtttttagcccaaatgaagaaataactaaaatttatcagatgaccaccaatggaagcaataagctggaggtggaagatgaacaagtttgctgtgaagcactggaagtgatgaccttatgttttgctttacttccaacagcgttggatgcacttagtaaagaaaaagcctggcagaccttcatcattgacttattattgcactgtccaagcaaaactgttcgtcagttggcacaggagcagttctttttaatgtgcaccagatgttgcatgggacacaggcctctgcttttcttcattactttactctttaccatactggggagcacagcaagagagaagggtaaatattcaggtgattatttcacacttttacggcaccttctcaattatgcttacaatggcaatattaacatacccaatgctgaagttcttcttgtcagtgaaattgattggctcaaaaggattagggataatgttaaaaacacaggtgaaacaggtgtcgaagagccaatactggaaggccaccttggggtaacaaaagagttattggcctttcaaacttctgagaaaaagtatcactttggttgtgaaaaaggaggtgctaatctcattaaagaattaattgatgatttcatctttcccgcatccaaagtttacctgcagtatttaagaagtggagaactaccagctgagcaggctattccagtctgtagttcacccgttaccatcaatgccggttttgagctacttgtagcattagctattggctgtgtgaggaatctcaaacagatagtagactgtttgactgaaatgtattacatgggcacagcaattactacttgtgaagcacttactgagtgggaatatctgccccctgttggaccccgcccaccaaaaggatttgtgggactcaaaaatgctggtgctacgtgttacatgaactctgtgatccagcagctatacatgattccttctatcaggaacagtattcttgcaattgaaggcacaggtagtgatttacacgatgatatgttcggggatgagaagcaggacagtgagagtaatgttgatccccgagatgatgtatttggatatcctcatcaatttgaagacaagccagcattaagtaagacagaagataggaaagagtataatattggtgtcctaagacaccttcaggtcatctttggtcatttagctgcttcccaactacaatactatgtacccagaggattttggaaacagttcaggctttggggtgaacctgttaatctccgtgaacaacatgatgccttagagttttttaattctttggtggatagtttagatgaagctttaaaagctttaggacacccggctatactaagtaaagtcctaggaggctcctttgctgatcagaagatctgccaaggctgcccacataggtatgaatgtgaagaatcttttacaactttgaatgtggatattagaaatcatcaaaatcttcttgactctttggaacagtatatcaaaggagatttattggaaggtgcaaatgcatatcattgtgaaaaatgtgataaaaaggttgacacagtaaagcgcctgctaattaaaaaattgcctcgggttcttgctatccaactcaaacgatttgactatgactgggaaagagaatgtgcaattaaattcaatgattattttgaatttcctcgagagctggatatgggaccttacacagtagcaggtgttgcaaacctggaaagggataatgtaaactcagaaaatgagttgattgaacagaaagagcagtctgacaatgaaactgcaggaggcacaaagtacagacttgtaggagtgcttgtacacagtggtcaagcaagcggtgggcattattattcttacatcattcaaaggaatggtaaagatgatcagacagatcactggtataaatttgatgatggagatgtaacagaatgcaaaatggatgatgatgaagaaatgaaaaatcagtgttttggtggagagtacatgggagaagtatttgatcacatgatgaagcgcatgtcatataggcgacagaagaggtggtggaatgcttacatacttttttatgaacaaatggatatgatagatgaagatgatgagatgataagatacatatcagagctaactattgcaagaccccatcagatcattatgtcaccagccattgagagaagtgtacggaaacaaaatgtgaaatttatgcataaccgattgcaatatagtttagagtattttcagtttgtgaaaaaactgcttacatgtaatggtgtttatttaaaccctgctccagggcaggattatttgttgcctgaagcagaagaaattactatgattagtattcagcttgctgctagattcctctttaccactggatttcacaccaagaaaatagttcgtggtcctgccagtgactggtatgatgcactgtgcgttcttctccgtcacagcaaaaatgtacgtttttggtttactcataatgtcctttttaatgtatcaaatcgcttctctgaataccttctggagtgccctagtgcagaagtgaggggtgcatttgcaaaacttatagtgtttattgcacacttttccttgcaagatgggtcttgtccttctccttttgcatctccaggaccttctagtcaggcatgtgataacttgagcttgagtgaccacttactaagagccacactaaatctcttgagaagggaagtttcagagcatggacatcatttacagcaatattttaatttgtttgtaatgtatgccaatttaggtgtggcagaaaaaacacagcttctgaaattgaatgtacctgctacctttatgcttgtgtctttagacgaaggaccaggtcctccaatcaaatatcagtatgctgaattaggcaagttatattcagtagtgtctcagctgattcgttgttgcaatgtgtcatcaacaatgcagtcttcaatcaatggtaatccccctctccccaatcctttcggtgaccttaatttatcacagcctataatgccaattcagcagaatgtgttagacattttatttgtgagaacaagttatgtgaagaaaattattgaagactgcagtaactcagaggataccatcaaattacttcgcttttgctcttgggagaatcctcagttctcatctactgtcctcagcgaacttctctggcaggttgcatattcatatacctatgaacttcggccatatttagatctacttttccaaattttactgattgaggactcctggcagactcacagaattcataatgcacttaaaggaattccagatgacagagatgggctgttcgatacaatacagcgctcgaagaatcactatcaaaaacgagcatatcagtgcataaaatgtatggtagctctatttagcagttgtcctgttgcttaccagatcttacagggtaacggagatcttaaaagaaaatggacctgggcagtggaatggctaggagatgaacttgaaagaagaccatatactggcaatcctcagtatagttacaacaattggtctcctccagtacaaagcaatgaaacagcaaatggttatttcttagaaagatcacatagtgctaggatgacacttgcaaaagcttgtgaactctgtccagaagaggagccagatgaccaggatgccccagatgagcatgagccctctccatcagaagatgccccattatatcctcattcacctgcctctcagtatcaacagaataatcatgtacatggacagccatatacaggaccagcagcacatcacttgaacaaccctcagaaaacaggccaacgaacacaagaaaattatgaaggcaatgaagaagtatcctcacctcagatgaaggatcagtgaaaagcaataattaactgcttcctttatgactatgcactaaggtcttatagtccaaactttctctgtgtctggctagtattgaaaactagataaactgctccaaaccaacatggagtaaagagcatattcactggtttatttgcagtaatttgcaatttgtcagtgtataagacacatgcagggtgaagtgtacagagttttgtaacaaatgactggtcctaatctgtaaatgagaaaggtatatatactatgttaatgtctgactgttaattcttaagcaagaaactttttttgatgaaaacaagtcagatctacacagtcacacaattattttttgttgtgttcactacattgtgcaattgatattgcctgctttgagcagtttggtcaacttaccaacttccccccaaaaaagggaacataaaagagcccatctttgtcagtttacaccaatagtttcttgttaatccttctttcctggatatataaggctggtggtaacttttgaattatatggttgatgtggaaaattggcagtgtaacatttctagatacttttcattacctttttattctggtatataggctaaccactttaaagctattcttatgctgtaacagttagcatggcttcacactgtttgtgtagccaagaggacagaattacatgaatgacagtgcccagagtgacagctgtatattgctcagagcttttatttcttatacctagaataaatataaaatgggggaaaaatgtgacagacaagcagtttttcattgcacacatattcttcacatttaatgtttgatagttcaatttcttgagctgaagaatatcaaagtatcgataatacgaattttaaaatattaaaaccaatacacaaaattttcctatgtcagaatgtggtggagcataatagattgtatttggtgtgcttgcgattttttttttccatagaatttattaagtgaagtttctaaaactttgcttctcctgatcccggtgaagtgtacatcataagaatccatagtactttgaagtaccattgcaccaagatgtctgactgaattcatagtcacacttttatttgaaagaaagaattgttgtagttttttttcattattctaaaactcttgttgttagatacaagatttaattaagatctaagctcctgcttatttaatgtaattctaaggtaccattttagaaaaaacatttgttttaagattccaagaaacctgtgagttaatactatatttaaaagagaattggtaaattttgaatgtgtgtaatattttggaacctgtttaaaaaccaaatatacctgcaaatagatacagcctatcctatactatttaaatgtttggctgttttgttttatagaaattattttgctgaattcacaaataaaatttaagaaga

SEQ ID NO: 510 - protein, 2555 aa, Homo sapiens
MTAITHGSPVGGNDSQGQVLDGQSQHLFQQNQTSSPDSSNENSVATPPPEEQGQGDAPPQHEDEEPAFPHTELANLDDMINRPRWVVPVLPKGELEVLLEAAIDLSVKGLDVKSEACQRFFRDGLTISFTKILMDEAVSGWKFEIHRCIINNTHRLVELCVAKLSQDWFPLLELLAMALNPHCKFHIYNGTRPCELISSNAQLPEDELFARSSDPRSPKGWLVDLINKFGTLNGFQILHDRFFNGSALNIQIIAALIKPFGQCYEFLSQHTLKKYFIPVIEIVPHLLENLTDEELKKEAKNEAKNDALSMIIKSLKNLASRISGQDETIKNLEIFRLKMILRLLQISSFNGKMNALNEINKVISSVSYYTHRHSNPEEEEWLTAERMAEWIQQNNILSIVLQDSLHQPQYVEKLEKILRFVIKEKALTLQDLDNIWAAQAGKHEAIVKNVHDLLAKLAWDFSPGQLDHLFDCFKASWTNASKKQREKLLELIRRLAEDDKDGVMAHKVLNLLWNLAQSDDVPVDIMDLALSAHIKILDYSCSQDRDAQKIQWIDHFIEELRTNDKWVIPALKQIREICSLFGEASQNLSQTQRSPHIFYRHDLINQLQQNHALVTLVAENLATYMNSIRLYAGDHEDYDPQTVRLGSRYSHVQEVQERLNFLRFLLKDGQLWLCAPQAKQIWKCLAENAVYLCDREACFKWYSKLMGDEPDLDPDINKDFFESNVLQLDPSLLTENGMKCFERFFKAVNCRERKLIAKRRSYMMDDLELIGLDYLWRVVIQSSDEIANRAIDLLKEIYTNLGPRLKANQVVIHEDFIQSCFDRLKASYDTLCVFDGDKNSINCARQEAIRMVRVLTVIKEYINECDSDYHKERMILPMSRAFRGKHLSLIVRFPNQGRQVDELDIWSHTNDTIGSVRRCIVNRIKANVAHKKIELFVGGELIDSEDDRKLIGQLNLKDKSLITAKLTQINFNMPSSPDSSSDSSTASPGNHRNHYNDGPNLEVESCLPGVIMSVHPRYISFLWQVADLGSNLNMPPLRDGARVLMKLMPPDRTAVEKLRAVCLDHAKLGEGKLSPPLDSLFFGPSASQVLYLTEVVYALLMPAGVPLTDGSSDFQVHFLKSGGLPLVLSMLIRNNFLPNTDMETRRGAYLNALKIAKLLLTAIGYGHVRAVAEACQPVVDGTDPITQINQVTHDQAVVLQSALQSIPNPSSECVLRNESILLAQEISNEASRYMPDICVIRAIQKIIWASACGALGLVFSPNEEITKIYQMTTNGSNKLEVEDEQVCCEALEVMTLCFALLPTALDALSKEKAWQTFIIDLLLHCPSKTVRQLAQEQFFLMCTRCCMGHRPLLFFITLLFTILGSTAREKGKYSGDYFTLLRHLLNYAYNGNINIPNAEVLLVSEIDWLKRIRDNVKNTGETGVEEPILEGHLGVTKELLAFQTSEKKYHFGCEKGGANLIKELIDDFIFPASKVYLQYLRSGELPAEQAIPVCSSPVTINAGFELLVALAIGCVRNLKQIVDCLTEMYYMGTAITTCEALTEWEYLPPVGPRPPKGFVGLKNAGATCYMNSVIQQLYMIPSIRNSILAIEGTGSDLHDDMFGDEKQDSESNVDPRDDVFGYPHQFEDKPALSKTEDRKEYNIGVLRHLQVIFGHLAASQLQYYVPRGFWKQFRLWGEPVNLREQHDALEFFNSLVDSLDEALKALGHPAILSKVLGGSFADQKICQGCPHRYECEESFTTLNVDIRNHQNLLDSLEQYIKGDLLEGANAYHCEKCDKKVDTVKRLLIKKLPRVLAIQLKRFDYDWERECAIKFNDYFEFPRELDMGPYTVAGVANLERDNVNSENELIEQKEQSDNETAGGTKYRLVGVLVHSGQASGGHYYSYIIQRNGKDDQTDHWYKFDDGDVTECKMDDDEEMKNQCFGGEYMGEVFDHMMKRMSYRRQKRWWNAYILFYEQMDMIDEDDEMIRYISELTIARPHQIIMSPAIERSVRKQNVKFMHNRLQYSLEYFQFVKKLLTCNGVYLNPAPGQDYLLPEAEEITMISIQLAARFLFTTGFHTKKIVRGPASDWYDALCVLLRHSKNVRFWFTHNVLFNVSNRFSEYLLECPSAEVRGAFAKLIVFIAHFSLQDGSCPSPFASPGPSSQACDNLSLSDHLLRATLNLLRREVSEHGHHLQQYFNLFVMYANLGVAEKTQLLKLNVPATFMLVSLDEGPGPPIKYQYAELGKLYSVVSQLIRCCNVSSTMQSSINGNPPLPNPFGDLNLSQPIMPIQQNVLDILFVRTSYVKKIIEDCSNSEDTIKLLRFCSWENPQFSSTVLSELLWQVAYSYTYELRPYLDLLFQILLIEDSWQTHRIHNALKGIPDDRDGLFDTIQRSKNHYQKRAYQCIKCMVALFSSCPVAYQILQGNGDLKRKWTWAVEWLGDELERRPYTGNPQYSYNNWSPPVQSNETANGYFLERSHSARMTLAKACELCPEEEPDDQDAPDEHEPSPSEDAPLYPHSPASQYQQNNHVHGQPYTGPAAHHLNNPQKTGQRTQENYEGNEEVSSPQMKDQ

SEQ ID NO: 511 - DNA, 111 bp, Homo sapiens
ggagaaaaagatcttcctcagaagaataggcttgttgttttacagtgttagtgatccattccctttgacgatccctaggtggagatggggcatgaggatcctccaggggaa

SEQ ID NO: 512 - DNA, 19296 bp, Homo sapiens
ccttcagttcttaaagcgctgcaattcgctgctgcagccatatttcttactctctcggggctggaagcttcctgactgaagatctctctgcacttggggttctttctagaacattttctagtcccccaacaccctttatggcgtatttctttaaaaaaatcacctaaattccataaaatatttttttaaattctatactttctcctagtgtcttcttgacacgtcctccatatttttttaaagaaagtatttggaatattttgaggcaatttttaatatttaaggaatttttctttggaatcatttttggttgacatctctgttttttgtggatcagttttttactcttccactctcttttctatattttgcccatcggggctgcggatacctggttttattattttttctttgcccaacggggccgtggatacctgccttttaattcttttttattcgcccatcggggccgcggatacctgctttttatttttttttccttagcccatcggggtatcggatacctgctgattcccttcccctctgaacccccaacactctggcccatcggggtgacggatatctgctttttaaaaattttctttttttggcccatcggggcttcggatacctgctttttttttttttatttttccttgcccatcggggcctcggatacctgctttaatttttgtttttctggcccatcggggccgcggatacctgctttgatttttttttttcatcgcccatcggtgctttttatggatgaaaaaatgttggttttgtgggttgttgcactctctggaatatctacacttttttttgctgctgatcatttggtggtgtgtgagtgtacctaccgctttggcagagaatgactctgcagttaagctaagggcgtgttcagattgtggaggaaaagtggccgccattttagacttgccgcataactcggcttagggctagtcgtttgtgctaagttaaactagggaggcaagatggatgatagcaggtcaggcagaggaagtcatgtgcattgcatgagctaaacctatctgaatgaattgatttggggcttgttaggagctttgcgtgattgttgtatcgggaggcagtaagaatcatcttttatcagtacaagggactagttaaaaatggaaggttaggaaagactaaggtgcagggcttaaaatggcgattttgacattgcggcattgctcagcatggcgggctgtgctttgttaggttgtccaaaatggcggatccagttctgtcgcagtgttcaagtggcgggaaggccacatcatgatgggcgaggctttgttaagtggttagcatggtggtggacatgtgcggtcacacaggaaaagatggcggctgaaggtcttgccgcagtgtaaaacatggcgggcctctttgtctttgctgtgtgcttttcgtgttgggttttgccgcagggacaatatggcaggcgttgtcatatgtatatcatggcttttgtcacgtggacatcatggcgggcttgccgcattgttaaagatggcgggttttgccgcctagtgccacgcagagcgggagaaaaggtgggatggacagtgctggattgctgcataacccaaccaattagaaatgggggtggaattgatcacagccaattagagcagaagatggaattagactgatgacacactgtccagctactcagcgaagacctgggtgaattagcatggcacttcgcagctgtctttagccagtcaggagaaagaagtggaggggccacgtgtatgtctcccagtgggcggtacaccaggtgttttcaaggtcttttcaaggacatttagcctttccacctctgtcccctcttatttgtcccctcctgtccagtgctgcctcttgcagtgctggatatctggctgtgtggtctgaacctccctccattcctctgtattggtgcctcacctaaggctaagtatacctccccccccaccccccaacccccccaactccccacccccaccccccaccccccacctccccacccccctacccccctacccccctacccccctctggtctgccctgcactgcactgttgccatgggcagtgctccaggcctgcttggtgtggacatggtggtgagccgtggcaaggaccagaatggatcacagatgatcgttggccaacaggtggcagaagaggaattcctgccttcctcaagaggaacacctaccccttggctaatgctggggtcggattttgatttatatttatcttttggatgtcagtcatacagtctgattttgtggtttgctagtgtttgaatttaagtcttaagtgactattatagaaatgtattaagaggctttatttgtagaattcactttaattacatttaatgagtttttgttttgagttccttaaaattccttaaagtttttagcttctcattacaaattccttaacctttttttggcagtagatagtcaaagtcaaatcatttctaatgttttaaaaatgtgctggtcattttctttgaaattgacttaactattttcctttgaagagtctgtagcacagaaacagtaaaaaatttaacttcatgacctaatgtaaaaaagagtgtttgaaggtttacacaggtccaggccttgctttgttcccatccttgatgctgcactaattgactaatcacctacttatcagacaggaaacttgaattgctgtggtctggtgtcctctattcagacttattatattggagtatttcaatttttcgttgtatcctgcctgcctagcatccagttcctccccagccctgctcccagcaaacccctagtctagccccagccctactcccaccccgccccagccctgccccagccccagtcccctaaccccccagccctagccccagtcccagtcctagttcctcagtcccgcccagcttctctcgaaagtcactctaattttcattgattcagtgctcaaaataagttgtccattgcttatcctattatactgggatattccgtttacccttggcattgctgatcttcagtactgactccttgaccattttcagttaatgcatacaatcccatttgtctgtgatctcaggacaaagaatttccttactcggtacgttgaagttagggaatgtcaattgagagctttctatcagagcattattgcccacaatttgagttacttatcattttctcgatcccctgcccttaaaggagaaaccatttctctgtcattgcttctgtagtcacagtcccaattttgagtagtgatcttttcttgtgtactgtgttggccacctaaaactctttgcattgagtaaaattctaattgccaataatcctacccattggattagacagcactctgaaccccatttgcattcagcagggggtcgcagacaacccgtcttttgttggacagttaaaatgctcagtcccaattgtcatagctttgcctattaaacaaaggcaccctactgcgctttttgctgtgcttctggagaatcctgctgttcttggacaattaaagaacaaagtagtaattgctaattgtctcacccattaatcatgaagactaccagtcgcccttgcatttgccttgaggcagcgctgactacctgagatttaagagtttcttaaattattgagtaaaatcccaattatccatagttctgttagttacactatggcctttgcaaacatctttgcataacagcagtgggactgactcattcttagagccccttcccttggaatattaatggatacaatagtaattattcatggttctgcgtaacagagaagacccacttatgtgtatgcctttatcattgctcctagatagtgtgaactacctaccaccttgcattaatatgtaaaacactaattgcccatagtcccactcattagtctaggatgtcctctttgccattgctgctgagttctgactacccaagtttccttctcttaaacagttgatatgcataattgcatatattcatggttctgtgcaataaaaatggattctcaccccatcccaccttctgtgggatgttgctaacgagtgcagattattcaataacagctcttgaacagttaatttgcacagttgcaattgtccagagtcctgtccattagaaagggactctgtatcctatttgcacgctacaatgtgggctgatcacccaaggactcttcttgtgcattgatgttcataattgtatttgtccacgatcttgtgcactaacccttccactccctttgtattccagcaggggacccttactactcaagacctctgtactaggacagtttatgtgcacaatcctaattgattagaactgagtcttttatatcaaggtccctgcatcatctttgctttacatcaagagggtgctggttacctaatgcccctcctccagaaattattgatgtgcaaaatgcaatttccctatctgctgttagtctggggtctcatcccctcatattccttttgtcttacagcagggggtacttgggactgttaatgcgcataattgcaattatggtcttttccattaaattaagatcccaactgctcacaccctcttagcattacagtagagggtgctaatcacaaggacatttcttttgtactgttaatgtgctacttgcatttgtccctcttcctgtgcactaaagaccccactcacttccctagtgttcagcagtggatgacctctagtcaagacctttgcactaggatagttaatgtgaaccatggcaactgatcacaacaatgtctttcagatcagatccattttatcctccttgttttacagcaagggatattaattacctatgttacctttccctgggactatgaatgtgcaaaattccaatgttcatggtctctccctttaaacctatattctaccccttttacattatagaaagggatgctggaaacccagagtccttctcttgggactcttaatgtgtatttctaattatccatgactcttaatgtgcatattttcaattgcctaattgatttcaattgtctaagacatttcaaatgtctaattgattagaactgagtcttttatatcaagctaatatctagcttttatatcaagctaatatcttgacttctcagcatcatagaagggggtactgatttcctaaagtctttcttgaatttctattatgcaaaattgccctgaggccgggtgtggtggctcacacctgtaatcccagcactttgggaggctgaggtgggaagatcccttactgccaggagtttgagaccagcctggccaacattaaaaaaaaaaaaaagtaagacaattgccctggaatcccatccccctcacacctccttggcaaagcagcaggagtgctaactagctagtgcttcttctcttatactgcttaaatgcgcataattagcagtagttgatgtgcccctatgttagagtagaatcccgcttccttgctccatttgcattactgcaggagcttctaactagcctgaattcactctcttggactgttaatgtgcatacttatatttgctgctgtacttttttaccatgtaaggaccccacccactgtatttacatcccagctggaagtacctactacttaagacccttagactagtaaagttagcgtgcataatcttaggtgttatatacacattttcagttgcatacagttgtgccttttatcaggactcctgtacttatcaaagcagagagtgctaatcaatattaagcccttctcttcgaactgtagatggcatgtaattgcagttgtcaatggtccttcaattagacttgggtttctgacctatcacaccctctttgctttattgcatggggtactattcacttaaggcccctttctcaaactgttaatgtgcctaatgacaattacatcagtatccttccttttgaaggacagcatggttggtgacacctaaggccccatttcttggcctcccaatatgtgtgattgtatttgtcgaggttgctatgcactagagaaggaaagtgctcccctcatccccacttttcccttccagcaggaagtgcccaccccataagacccttttatttggagagtctaggtgcacaattgtaagtgaccacaagcatgcatcttggacatttatgtgcgtaatcgcacactgctcattccatgtgaataaggtcctactctccgaccccttttgcaatacagaagggttgctgataacgcagtccccttttcttggcatgttgtgtgtgattataatcgtctgggatcctatgcactagaaaaggagggtcctctccacatacctcagtctcacctttcccttccagcagggagtgcccactccataagactctcacatttggacagtcaaggtgcgtaattgttaagtgaacacaaccatgcaccttagacatggatttgcataactacacacagctcaacctatctgaataaaatcctactctcagaccccttttgcagtacagcaggggtgctgatcaccaaggccctttttcctggcctggtatgcgtgtgattatgtttgtcccggttcctgtgtattagacatggaagcctcccctgccacactccacccccaatcttcctttcccttccggcagggagtgccctctccataagacgcttacgtttggacaatcaaggtgcacagttgtaagtgaccacaggcatacaccttggacattaatgtgcataaccactttgcccattccatctgaataaggtcctactctcagaccccttttgcagtacagcaggggtgctgatcaccaaggccccttttcttggcctgttatgtgcgtgattatatttgtctgggttcctgtgtattagacaaggaagccttccccccgcccccacccccactcccagtcttcctttcccttccagcagggagtgccccctccataagatcattacatttggacaatcaaggtgcacaattataagtgaccacagccatgcaccttggacattattggacattaatgtgcgtaactgcacatggcccatcccatctgaataaggtcctactctcagatgccctttgcagtacagcaggggtactgaatcaccaaggccctttttcttggcctgttatgtgtgtgattatatttatcccagtttctgtgtaatagacatgaaagcctcccctgccacaccccacctccaatcttcctttcccttccaccagggagtgtccactccatatacccttacatttggacaatcaaggtgcacaattgtaagtgagcataggcactcaccttggacatgaatgtgcataactgcacatggcccatcccatctgaataaggtcctactctcagaccctttttgcagtacagcaggggtgctgatcaccaaggccccttttcctggcctgttatgtgtgtgattatatttgttccagttcctgtgtaatagacatggaagcctcccctgccacactccacccccaatcttcctttcccttctggcaggaagtacccgctccataagacccttacatttggacagtcaaggtgcacaattgtatgtgaccacaaccatgcaccttggacataaatgtgtgtaactgcacatggcccatcccatctgaataaggtcctactctcagaccccttttgcagtacagtaggtgtgctgataaccaaggcccctcttcctggcctgttaacgtatgtgattatatttgtctgggttccagtgtataagacatggaagcctcccctgccccaccccaccctcaatcttcctttcccttctggcagggagtgccagctccataagaaccttacatttggacagtcaaggtgcacaattctaagtgaccgcagccatgcaccttggtcaataatgtgtgtaactgcacacggcctatctcatctgaataaggccttactctcagaccccttttgcagtacagcaggggtgctgataaccaaggcccattttcctggcctgttatgtgtgtgattatatttgtccaggtttctgtgtactagacaaggaagcctcctctgccccatcccatctacgcataatctttcttttcctcccagcagggagtgctcactccataagacccttacatttggacaatcaaggtgcacaattgtaagtgaccacaaccatgcatcttggaaatttatgtgcataactgcacatggcttatcctatttgaataaagtcctactctcagaccccctttgcagtatagctggggtgctgatcactgaggcctctttgcttggcttgtctatattcttgtgtactagataagggcaccttctcatggactccctttgcttttcaacaaggagtacccactactttttaagattcttatatttgtccaaagtacatggttttaattgaccacaacaatgtcccttggacattaatgtatgtaatcaccacatggttcatcctaattaaacaaagttctaccttctcaccctccatttgcagtataccagggttgctgaccccctaagtccccttttcttggcttgttgacatgcataattgcatttatgttggttcttgtgccctagacaaggatgccccacctcttttcaatagtgggtgcccactccttatgatctttacatttgaacagttaatgtgaataattgcagttgtccacaaccctatcacttctaggaccattatacctcttttgcattactgtggggtatactgtttccctccaaggccccttctggtggactatcaacatataattgaaattttcttttgtctttgtcagtagattaaggtcataccccatcacctttcctttgtagtacaacagggtgtcctgatcaaccaaagtcctgttgttttggactgttaatatgtgcaattacatttgctcctgatctgtgcactagataaggatcctacctactttcttagtgtttttagcaggtagtgcccactactcaagactgtcacttggaatgttcatgtgcacaaactcaattctctaagcatgttcctgtaccacctttgctttagagcagggggatgatattcactaagtgccccttcttttggacttaatatgcattaatgcaattgtccacctcttcttttagactaagagttgatctccacatattccccttgcatcaggggcatgttaattatgaatgaacccttttcttttaatattaatgtcataattgtatttgtggacctgtgtaggagaaaaagaccctatgttcctcccattaccctttggattgctgctgagaagtgttaactactcataatctcagctcttggacaattaatagcattaataacaattatcaagggcactgatcattagataagactcctgcttcctcgttgcttacatcgggggtactgacccactaaggccccttgtactgttaatgtgaatatttgcaattatatatgtctccttctggtagagtgggatattatgccctagtatcccctttgcattactgcaggggctgctgactactcaaaacttctcctgggactgttaataggcacaatggcagttatcaatggttttctccctccctgaccttgttaagcaagcgccccaccccacccttagtttcccatggcataataaagtataagcattggagtattccatgcacttgtctatcaaacagtggtccatactcccaacccttttgcattgcgccagtgtgtaaaatcacaggtagccatggtgtcatgctttatatacgaagtcttccctctctctgccccttgtgtgcccttggcccctttttacagactattgctcacaatctcaggtgtccatatttgcagctattaggtaagattgtgctgtctccctcttcccttccctctgccctgccccttttgcctctttgctgggtaatgttgaccagacaaggccctttctcttggacttaaacaattctcagttgcactttccttggtcccacccattatacatgaacccctctacttcctttcgcattgcttctgagtatgctgactacccaaagccccttctgtgttattaataaacacagtactgattgtcccatttttcagcccatcagtccaagatctccctaccactttggtgtgttggtgcagtgttgactatgaaaagcaggcctgaactaggtggataagccttcactcattttctttcatttattaatgatcctagtttcaattattgtcagattctggggacaagaaccattcttgcccacctgtgttactgctttactgtgcaaaatactgaaggcaagtcagacccagggagctggattgccatcctttattttgtgtttccagtgtacactataaaattgtctccccaggaaggaaggttggcactttctctgcattcttctttccagagcagattgcctggttaagaatctcttgttgtcccctttgtatattgttattgtaaagtgccaaatgccaggatacagccagaaaaattgcttattattattaaaaaaatttttttaagaaagacatctggattgtagggtggactcgataacctggtcattatttttttgaagccaaaatatccatttatactatgtacctggtgaccagtgtctctcattttaactgagggtggtgggtctgtggatagaacactgactcttgctattttaatatcaaagatattctagagtggaactcttaagaccagtatctttgtgtgggctttaccagcattcacttttagaaaaactacctaaattttataatcctttaatttcttcatctggagcacctgcccctacttatttcaagaagattgcagtaaaacgattaaatgagggaacatatgcagaggtgcttttaaaaagcatatgccaccttttttattaattattatataaaatgaagcatttaattatagtaataatttgaagtagtttgaagtaccacactgaggtgaggacttaaaaatgataagacgagttccctattttataagaaaaataagccaaaattaaatattcttttggatataaatttcaacagtgagatagctgcctagtggaaatgaataatatcccagccactagtgtacagggtgttttgtggcacaggattatgtaatatggaactgctcaagcaaataactagtcatcacaacagcagttctttgtaataactgaaaaagaatattgtttctcggagaaggatgtcaaaagatcggcccagctcagggagcagtttgccctactagctcctcggacagctgtaaagaagagtctctggctctttagaatactgatcccattgaagataccacgctgcatgtgtccttagtagtcatgtctccttaggctcctcttggacattctgagcatgtgagacctgaggactgcaaacagctataagaggctccaaattaatcatatctttccctttgagaatctggccaagctccagctaatctacttggatgggttgccagctatctggagaaaaagatcttcctcagaagaataggcttgttgttttacagtgttagtgatccattccctttgacgatccctaggtggagatggggcatgaggatcctccaggggaaaagctcactaccactgggcaacaaccctaggtcaggaggttctgtcaagatactttcctggtcccagataggaagataaagtctcaaaaacaaccaccacacgtcaagctcttcattgttcctatctgccaaatcattatacttcctacaagcagtgcagagagctgagtcttcagcaggtccaagaaatttgaacacactgaaggaagtcagccttcccacctgaagatcaacatgcctggcactctagcacttgaggatagctgaatgaatgtgtatttctttgtctctttctttcttgtctttgctctttgttctctatctaaagtgtgtcttacccatttccatgtttctcttgctaatttctttcgtgtgtgcctttgcctcattttctctttttgttcacaagagtggtctgtgtcttgtcttagacatatctctcatttttcattttgttgctatttctctttgctctcctagatgtggctcttctttcacgctttatttcatgtctcctttttgggtcacatgctgtgtgctttttgtccttttcttgttctgtctacctctcctttctctgcctacctctcttttctctttgtgaactgtgattatttgttaccccttccccttctcgttcgttttaaatttcaccttttttctgagtctggcctcctttctgctgtttctactttttatctcacatttctcatttctgcatttcctttctgcctctcttgggctattctctctctcctcccctgcgtgcctcagcatctcttgctgtttgtgattttctatttcagtattaatctctgttggcttgtatttgttctctgcttcttccctttctactcacctttgagtatttcagcctcttcatgaatctatctccctctctttgatttcatgtaatctctccttaaatatttctttgcatatgtgggcaagtgtacgtgtgtgtgtgtcatgtgtggcagaggggcttcctaacccctgcctgataggtgcagaacgtcggctatcagagcaagcattgtggagcggttccttatgccaggctgccatgtgagatgatccaagaccaaaacaaggccctagactgcagtaaaacccagaactcaagtagggcagaaggtggaaggctcatatggatagaaggcccaaagtataagacagatggtttgagacttgagacccgaggactaagatggaaagcccatgttccaagatagatagaagcctcaggcctgaaaccaacaaaagcctcaagagccaagaaaacagagggtggcctgaattggaccgaaggcctgagttggatggaagtctcaaggcttgagttagaagtcttaagacctgggacaggacacatggaaggcctaagaactgagacttgtgacacaaggccaacgacctaagattagcccagggttgtagctggaagacctacaacccaaggatggaaggcccctgtcacaaagcctacctagatggatagaggacccaagcgaaaaaggtatctcaagactaacggccggaatctggaggcccatgacccagaacccaggaaggatagaagcttgaagacctggggaaatcccaagatgagaaccctaaaccctacctcttttctattgtttacacttcttactcttagatatttccagttctcctgtttatctttaagcctgattcttttgagatgtactttttgatgttgccggttacctttagattgacagtattatgcctgggccagtcttgagccagctttaaatcacagcttttacctatttgttaggctatagtgttttgtaaacttctgtttctattcacatcttctccacttgagagagacaccaaaatccagtcagtatctaatctggcttttgttaacttccctcaggagcagacattcatataggtgatactgtatttcagtcctttcttttgaccccagaagccctagactgagaagataaaatggtcaggttgttggggaaaaaaaagtgccaggctctctagagaaaaatgtgaagagatgctccaggccaatgagaagaattagacaagaaatacacagatgtgccagacttctgagaagcacctgccagcaacagcttccttctttgagcttaggtgagcaggattctggggtttgggatttctagtgatggttatggaaagggtgactgtgcctgggacaaagcgaggtcccaaggggacagcctgaactccctgctcatagtagtggccaaataatttggtggactgtgccaacgctactcctgggtttaatacccatctctaggcttaaagatgagagaacctgggactgttgagcatgtttaatactttccttgatttttttcttcctgtttatgtgggaagttgatttaaatgactgataatgtgtatgaaagcactgtaaaacataagagaaaaaccaattagtgtattggcaatcatgcagttaacatttgaaagtgcagtgtaaattgtgaagcattatgtaaatcaggggtccacagtttttctgtaaggggtcaaatcataaatactttagactgtgggccatatggtttctgttacatatttgttttttaaacaacgtttttataaggtcaaaatcattcttagtttttgagccaattggatttggcctgctgttcatagcttaccaccccctgatgtattatttgttattcagagaaaatttctgaatactactagtttccttttctgtgcctgtccctgtgctaggcactaaaaatgcaatgattattgatatctaggtgacctgaaaaaaaatagtgaatgtgctttgtaaactgtaaagcacttgtattctactgtgataagcgttgtggatacaaagaaaggagcaagcataaaaaagtgctctttcaaaaggatatagtactatgcagacacaaggaattgtttgataaatgaataaattatatgtatatttgaggccaatttgtgtttgctgctctggtaattttgagtaaaaatgcagtattccaggtatcagaaacgaaaacacatggaaactgcttttaaactttaaaatatactgaaaacataagggactaagcttgttgtggtcacctataatgtgccagataccatgctgggtgctagagctaccaaagggggaaaagtattctcatagaacaaaaaatttcagaaaggtgcatattaaagtgctttgtaaactaaagcatgatacaaatgtcaatgggctacatatttatgaatgaatgaatggatgaatgaatattaagtgcctcttacataccagctattttgggtactgtaaaatacaagattaattctcctatgtaataagaggaaagtttatcctctatactattcagatgtaaggaatgatatattgcttaattttaaacaatcaagactttactggtgaggttaagttaaattattactgatacatttttccaggtaaccaggaaagagctagtatgaggaaatgaagtaatagatgtgagatccagaccgaaagtcacttaattcagcttgcgaatgtgctttctaaattataaagcacttgtaaatgaaaaatttgatgctttctgtatgaataaaactttctgtaagctaggtattgtctctacaaaattctcattgtatagttaaaccacagtgagaagggttctataagtagttatacaaaccaagggtttaaatacctgttaaatagatcaattttgattgcctactatgtgaactcactgttaaaggcactgaaaatttatcatatttcatttagccacagccaaaaataaggcaatacctatgttagcattttgtgaactctaaggcaccatataaatgtaactgttgattttctcacttggtgctgggtactaggtttataaaattgtatgatagttattatattgtgcaaataaagtaggaaaatttgaataacaatgattatcttttgaatacgcatacgcaagggattggttgtctgaagaatgccactatagtagttatctattgtgtgccaatctcattgctaggcattggggatgcaaagataaaccatctttattgtgtcttgggtagcagaagaaaatatgtgtaaaatcaatttataatttgtaaactgccacccatatataagctatatctgctgaatgatcattgattactcttatccttagagataacaactgggggcacaaacatttattatcattattgaacctacaacagagatctatgtgtagatttacaaagcctacagttctatacagataggaatgaactattggcttactgaatggtgattactttctgtggggctcggaactacatgccctaggatataaaaatgatgttatcattatagagtgctcacagaaggaaatgaagtaatataggtgtgagatccagaccaaaagtcatttaacaagtttattcagtgatgaaaacatgggacaaatggactaatataaggcagtgtactaagctgagtagagagataaagtcctgtccagaagatacatgcttcctggcctgattgaggagatggaaaatttttgcaaaaaacaaggtgttgtggtcttccatccagtttcttaagtgctgatgataaaagtgaattagacccaccttgacctggcctacagaagtaaaggagtaaaaataaatgcctcaggcgtgctttttgattcatttgataaacaaagcatcttttatgtggaatataccattctgggtcctgaggataagagagatgagggcattagatcactgacagctgaagatagaagaacatctttggtttgattgtttaaataatatttcaatgcctattctctgcaaggtactatgtttcgtaaattaaataggtctggcccagaagacccactcaattgcctttgagattaaaaaaaaaaaaaaaaagaaagaaaaatgcaagtttctttcaaaataaagagacatttttcctagtttcaggaatcccccaaatcacttcctcattggcttagtttaaagccaggagactgataaaagggctcagggtttgttctttaattcattaactaaacattctgcttttattacagttaaatggttcaagatgtaacaactagttttaaaggtatttgctcattggtctggcttagagacaggaagacatatgagcaataaaaaaaagattcttttgcatttaccaatttagtaaaaatttattaaaactgaataaagtgctgttcttaagtgcttgaaagacgtaaaccaaagtgcactttatctcatttatcttatggtggaaacacaggaacaaattctctaagagactgtgtttctttagttgagaagaaacttcattgagtagctgtgatatgttcgatactaaggaaaaactaaacagatcacctttgacatgcgttgtagagtgggaataagagagggctttttattttttcgttcatacgagtattgatgaagatgatactaaatgctaaatgaaatatatctgctccaaaaggcatttattctgacttggagatgcaacaaaaacacaaaaatggaatgaagtgatactcttcatcaaacagaagtgactgttatctcaaccattttgttaaatcctaaacagaaaacaaaaaaaatcatgacgaaaagacacttgcttattaattggcttggaaagtagaatataggagaaaggttactgtttattttttttcatgtattcattcattctacaaatatattcgggtgccaataggtacttggtataaggtttttggccccagagacatgggaaaaaaatgcatgccttcccagagaatgcctaatactttccttttggcttgttttcttgttaggggcatggcttagtccctaaataacattgtgtggtttaattcctactccgtatctcttctaccactctggccactacgataagcaggtagctgggttttgtagtgagcttgctccttaagttacaggaactctccttataatagacacttcattttcctagtccatccctcatgaaaaatgactgaccactgctgggcagcaggagggatgatgaccaactaattcccaaaccccagtctcattggtaccagccttggggaaccacctacacttgagccacaattggttttgaagtgcatttacaaggtttgtctattttcagttctttactttttacatgctgacacatacatacactgcctaaatagatctctttcagaaacaatcctcagataacgcatagcaaaatggagatggagacatgatttctcatgcaacagcttctctaattataccttagaaatgttctcctttttatcatcaaatctgctcaagaagggctttttatagtagaataatatcagtggatgaaaacagcttaacattttaccatgcttaagttttaagaataaaataaaaattggaaataattggccaaaattgaaaggaaaaatttttttaaaatttctctaaatgtaggcctggctgggctttgaccttttccgtttttaaatcactcacagagggtgggacaggaggaagagtgaaggaaaaggtcaaacctgttttaagggcaacctgcctttgttctgaattggtcttaagaacattaccagctccaggtttaaattgttcagtttcatgcagttccaatagctgatcattgttgagatgaggacaaaatcctttgtcctcactagtttgctttacatttttgaaaagtattatttttgtccaagtgcttatcaactaaaccttgtgttaggtaagaatggaatttattaagtgaatcagtgtgacccttcttgtcataagattatcttaaagctgaagccaaaatatgcttcaaaagaagaggactttattgttcattgtagttcatacattcaaagcatctgaactgtagtttctatagcaagccaattacatccataagtggagaaggaaatagataaatgtcaaagtatgattggtggagggagcaaggttgaagataatctggggttgaaattttctagttttcattctgtacatttttagttagacatcagatttgaaatattaatgtttacctttcaatgtgtggtatcagctggactcagtaacacccctttcttcagctggggatggggaatggattattggaaaatggaaagaagaaagtaactaaaagccttcctttcacagtttctggcatcactaccactactgattaaacaagaataagagaacattttatcatcatctgctttattcacataaatgaagttgtgatgaataaatctgcttttatgcagacacaaggaattaagtggcttcgtcattgtccttctacctcaaagataatttattccaaaagctaagataaatggaagactcttgaacttgtgaactgatgtgaaatgcagaatctcttttgagtctttgctgtttggaagattgaaaaatattgttcagcatgggtgaccaccagaaagtaatcttaagccatctagatgtcacaattgaaacaaactggggagttggttgctattgtaaaataaaatatactgttttgaaaactttgaaaaaaaaaaaaaaaa

SEQ ID NO: 513 - skipped

SEQ ID NO: 514 - DNA, 105 bp, Homo sapiens
caccgcgacctcagccgcgaccgcccgctcgtactgctgctgcacctgctgcaacttgggccccttttcaggtgttttgaagtcttctgcatctactttcagtca

SEQ ID NO: 515 - DNA, 5174 bp, Homo sapiens
agagcccaggccggtcggccgggcccgcgtgccctcggcgggctgcgcagagcgcgggagcggtttggggctgggcatgctgggagcccctcgggcaacggccgccgccgccacagccacacagccgccgccactgcgtccgtccccggtgagcgccgctgacgcgcggagatgaaattcccggcctcggtgctggcgtccgtgttcctgttcgtggccgagacaacggcggcgctcagcctgagcagcacctaccgctcgggcggggaccgcatgtggcaggcgctgacgttgcttttctcgctactgccttgcgcgctcgtgcagctcacgcttctcttcgtacaccgcgacctcagccgcgaccgcccgctcgtactgctgctgcacctgctgcaacttgggccccttttcaggtgttttgaagtcttctgcatctactttcagtcaggcaacaatgaagagccttatgtcagtatcaccaagaagaggcaaatgccaaaaaatggcctctcagaggagattgagaaggaggtgggccaggcagaaggcaaactaatcacccaccgatcagcgttcagccgggcgtcggtgatccaggctttcttgggctcagccccccagctgaccctacagctgtacataagtgtcatgcagcaggacgtcactgttggaagaagtctcctcatgaccatatccctgttgtccattgtgtatggagccttgcgctgcaacatcctagccatcaaaatcaagtacgatgagtatgaagtcaaagtgaagcctctggcctatgtctgtatcttcctgtggaggagctttgagattgccactcgagttgtagtcctggtcctctttacctccgtcctgaagacctgggtggtggttataatactcatcaacttcttcagtttcttcttgtacccctggatcctcttctggtgcagtggttccccattccctgagaacatagagaaggccctcagtagagtgggcaccaccattgtactatgctttctaactttactctatactggtatcaacatgttctgctggtctgctgtacagctgaaaattgacagccctgacctcatcagcaagtcccataattggtaccagctactggtgtattacatgataagattcatcgagaatgccatcctcctcctcctgtggtatcttttcaagactgacatctatatgtatgtgtgcgcacctctgttggtcctgcagctgctcattgggtactgcacagccattctcttcatgcttgtattctatcagttcttccacccttgcaaaaagctcttttcttccagtgtttctgaaggctttcagaggtggctcaggtgtttttgctgggcctgcaggcagcaaaaaccctgtgagccgataggaaaggaagatctacagtcatccagagatagagatgagacaccttctagcagtaaaacaagtcctgagcctggtcagttcttgaatgctgaagatctctgctctgcttaatgggacccaaggtctcagagcacaggcatattattttctgggtttgatactcgttattcatacaaataatgagccctacacagggaacaaggcaggaagttagctgttaactccttgtgagctgcttctctttatagagctcttgggtatgtagaactgtatgggaagaagccaggaaaacctctgagtgttgaaggggcaacccaaggcatcacagttcacaggtaaccatgttgtgttcttctaggcattactggccttttcactgacaagttacccctgaaatctgagttgtactggttagattcattaggttgaatgaggagaggggcttacctgttctctagttttccagactgctggtttgggtaacctgaagttttatgatccctgaacatagttttcacccaagagctgtcctggtgaccaaaaaagattactagggttttgccatcagcaacatcattcctgtcagagctttcagggagggctgttcaagtttggtttttgaatagacagaggtttcattttcatctcattagggcttttttgtacatagccaactgtagccaccctggcatgctgtctctaattgattcaagggcctagatttggagactttgttccttagcatccatggatgcagaaatgagtgataaatttggccatgaaagccctggaattttaggaaagttgtgattctttgatatgttgatgaaattctggatcaggaggggtgttaaaacatcaaaatgatggcgacttgtataagtagaattcttaccatcttactcctgcctccccattccttgcctgtcaggaccattttagaagagttaccttggttaacttaagggttttttagaaaaccccacagaaatctctcacccagttcaggtgtatagggaattttcattttcattatttcaaggaatagagttttcctcactaccacttgtaattagagattgacttcagaaactttttctaaattataaagacggaatgaccagaaaatttttgtctttcatggaatgcaatttgacttggcataattgtgagttaatttgataaagatctccagttgtatcctctgacaccctttaatgttctatataatttttcctttaatcggagaccctatttgtttcattaaagaggattgggtagcatatcctcaattatcttggaaaaatgcgtagatctagtgccattatttctaccattaaaatcttgaaagcgaaatacttgaaaagaggtgaccataaagatcacaccaatttagaatgaatattaaagtctgagaaatttacaaaagggactctatggactcgattttaccatatggaatagggatccacttctctgttaacctacaaaacgtatttatctggccattgcacttcggataattttcatttttaattcctcttggtgtcaaatttttaagtaatttcatgcacacaggagaaaatgcaatttgataatcagtttccactacattcggaggtcaagaaagcagtatatattctttcacaaggcatccatactgtttaatatttatagagttcatagaaatacatcaataagctcctaaattatagagcctcaattttggtttttctcatttgaaatgtttttgatttatcaatatttgtggtttaactttgtgggggtgtccaggcagtagatcattttttgtctatttttaaccaaataagaataacactcaagactatgttctccatcccaacacatcacttaccacttgcactattcttaataggcctaaaatagtgagcatatataatcaaaataatacttcatacaacatatacttccatgcactcttcatgtaatcacatatgtgcatagatacacaatcgtattacataaaacacccttgaaaatatatgactttgaataaaataaagctaccatgttaatacatcattttttgtttcttcctaattaacaaaagggctctataatgattaggagagctgtaaggccattctttagtcattccaagtgtatatttgtatcacaccagttacttgtgttcattgacaccaaatattttcaagctttttgtgagaaagagattcttgccttgaggctctgcagtggcaaatggtaggggcaatagcgctcccttttcacctgaaatgccttcagctcaggccttgggagtgaggtgtgggagtagccaccagcctcccactgactaggcatgttaggaattagacaaggatggagagactggttttttccagccttggtttggaagcttgtctcaaaaaccattacaaaatcttaaccttcaaatacattctaaatcactttaatttagaagataggtgagcaacttgagtgatcccaaaccaaactaacagtgctggtttgtccgacacccaaagcccacttcacacatttataaggacagagatttggtaactcatttgggtattttgtcagttttaacccttaatatacaggtatcccagctttgggcacatgtatgtccattcactttcaggaaggggtgtcagtactttctttctgtgtggtgaaaacataagccatggtgaactgataatttttgtttttaaattatttatattactgaattggcaaaattacagttcacactgcagagctaggttgtcctattggcataaaacaaaccagcaacttttctcatgtgtttggagttaaaatgtgtttttcagttataatttcaatttttaaatttcttggtgctttgtctaattaattacatcccataacttgtcaggatagttgctccaactgaattgctatcatttggctggatgggggtgaagtatgtcttcaaaatatattgaagtaagttcatcaaacatgtttagacttcctctcattgctggagacagcccagtgtagagattggcacttccctgtccagcactacaacttaattgctctatgcctcagtttccccataatacccttttccaacctacctcacaaggttatcagaaagatcaaattaaataatagatgtgaaaatgctttgaaaatgtttttaagtgctatgcatatttatagagttattatagttattcaaatccataagcaggttatttttatttttttactgtttgaaaagaaataagtagtgtcattcatatgagttcctgagtggatatgcgaatctttggtcttctcgacaggtgccctttctcttaccactagttgcttacaaaaatagcacccaaacacatggcacttggaagaaaaagacccactgaatctgagaaagtactttctggtggcaaatgaatttatcattttagtatagttttcgataaaggatatagcaacatcttttgataattgtgctttacaacttgaatgctgattcaaggcattatttggatgtgagtttaatcttttcagccttgtaaatgggaaaatatatattaaaattgattgtcaaatacagcatttctttggaaaccaccttaaaacattagtgctatggttatgagtgtatgtgccagtacttaccagtcaatgcattgtggatatgagctttcgttgactgcttctctgcagtcgttgatgctaataaatattgtcctgtttcttcatataataaattaatttttcaatttctccttgta

SEQ ID NO: 516 - protein, 444 aa, Homo sapiens
MKFPASVLASVFLFVAETTAALSLSSTYRSGGDRMWQALTLLFSLLPCALVQLTLLFVHRDLSRDRPLVLLLHLLQLGPLFRCFEVFCIYFQSGNNEEPYVSITKKRQMPKNGLSEEIEKEVGQAEGKLITHRSAFSRASVIQAFLGSAPQLTLQLYISVMQQDVTVGRSLLMTISLLSIVYGALRCNILAIKIKYDEYEVKVKPLAYVCIFLWRSFEIATRVVVLVLFTSVLKTWVVVIILINFFSFFLYPWILFWCSGSPFPENIEKALSRVGTTIVLCFLTLLYTGINMFCWSAVQLKIDSPDLISKSHNWYQLLVYYMIRFIENAILLLLWYLFKTDIYMYVCAPLLVLQLLIGYCTAILFMLVFYQFFHPCKKLFSSSVSEGFQRWLRCFCWACRQQKPCEPIGKEDLQSSRDRDETPSSSKTSPEPGQFLNAEDLCSA

SEQ ID NO: 517 - DNA, 108 bp, Homo sapiens
cttcccccaatggcatcttactcttccgagaaaccagcaagatgataacaatgtatggcaatcgcatcctgacactaggagaggtcccaaaggatcaggtctatgctc

SEQ ID NO: 518 - DNA, 4897 bp, Homo sapiens
agcgcgcaggcgcagcggcgacggcgtcggcggcggcggcggcagcggctccggccgaggtgcgcgctgggggggagggggggccggagaggagcatgaatggagcaaaatggcggatcatgtgcagagcctggcccaactagagaatctgtgcaaacagctgtatgaaaccacagacacaaccactcgactccaggcagagaaagccttggttgaatttaccaacagccctgattgcctgagcaagtgccagctactcctcgaaagaggaagttcctcttactcccagttactggcagctacatgccttaccaagcttgtatcacgcacaaacaaccccctaccattggaacagcgaatagatattcggaactatgtgctcaactaccttgccactcggccgaagttggctactttcgtgacacaagcacttattcagttatatgccagaatcacaaaactgggctggtttgactgtcagaaggatgactatgtcttcagaaatgcaatcacagacgtcacaaggtttttacaggatagtgttgaatactgcatcattggtgtcacaattttatctcagctaaccaatgaaattaatcaagtaagtgctacagccttcctcattgaagcagacaccacccatcctttaaccaagcacagaaaaatagcctcttcttttcgcgattcatcattatttgatatcttcacactttcctgcaatttactaaaacaggcttcaggaaagaatctaaacttgaatgatgaaagtcagcatggcttgctcatgcaactgctcaagctcactcataactgcctcaactttgacttcatcggcacttccactgatgagtcctcagacgacctgtgtacagtgcagattcccaccagctggagatcagccttcttagattcttcaaccttgcagctgttttttgacctgtatcattccatccctccttcattttcacctctggtattatcctgcttggtacagatcgcttcagtcagaagatccctgtttaacaatgcagagagggccaagtttctctctcatcttgttgatggtgttaaacgaatactggaaaacccacagagtttatcagacccaaacaattaccatgagttttgcagactactggcccgattgaagagtaactatcaactgggagaattggtaaaggtggaaaactaccctgaggtcatccgattgatagccaacttcacagtgaccagcctacagcactgggaatttgctccaaatagtgtgcactatcttctgagcctgtggcagcggctggcagcctctgtgccgtatgtcaaagccacagagccccacatgctggaaacttacactcctgaggtcaccaaagcctacatcacatcccggttggaatctgtgcacatcatactgagagatggcctggaagatcccctggaggatacggggctggtccagcagcagttggaccagctgtccaccattgggcgttgtgaatatgagaagacgtgtgcactcctcgtgcagttgtttgaccagtcggcccagtcgtaccaggagctgctacagagcgccagcgcaagcccaatggacattgcagtgcaggagggaaggctgacatggctggtttacattattggagcagtgatcggtggccgggtttcttttgccagcactgatgagcaagacgccatggatggtgagcttgtctgtcgggtgctccagctgatgaacctaacagattctcgtttggcccaggcgggtaatgagaagctagagttggccatgctgagcttttttgaacagtttcgtaagatctacattggggaccaagtgcagaaatcctctaagctgtaccgccgactctcagaagttctgggcttgaatgatgagaccatggtcctaagcgtcttcataggaaaaatcatcaccaacttgaagtactggggccgttgtgaaccaatcacctccaagacactacagcttctcaatgacctgtccattgggtacagtagcgtaaggaagctagtgaagcttagtgcggtacagttcatgctgaacaatcacacgagcgagcacttttcatttttgggtattaacaatcagtccaacctgacagacatgcggtgtcggactaccttctacacagcacttgggcgtctcctcatggtggatttaggagaggatgaagatcagtatgagcagttcatgctgccactcacagcagcatttgaggctgtggcccagatgtttagcaccaatagtttcaacgagcaggaggcaaagcgaactctagttggcctagtaagagacctgagagggatcgctttcgctttcaatgccaagaccagcttcatgatgctctttgaatggatatatccatcctatatgccaattctccaacgggcaattgagctctggtaccatgatccagcctgtactacacctgtactcaagttgatggctgaattggttcataataggtcccagcgactccagtttgatgtctcttcccccaatggcatcttactcttccgagaaaccagcaagatgataacaatgtatggcaatcgcatcctgacactaggagaggtcccaaaggatcaggtctatgctctgaagctcaagggcatctccatctgcttctccatgctgaaggctgctctcagtgggagttacgtcaatttcggagtctttcgtctctatggagacgatgccctggacaatgctctgcagaccttcatcaagctgctcctctctattcctcacagtgatctcttggattaccccaagctcagccagtcttattattcactactggaagtcctgacccaggaccatatgaactttattgcaagcctggaacctcacgtcatcatgtatattctctcttccatttctgaaggacttactgcacttgacaccatggtatgcacaggctgctgctcctgcctggaccacattgtgacatacctcttcaagcagctgtcacgtagcaccaagaagaggaccacacccctgaaccaggagagcgaccgctttctgcacatcatgcagcagcatccagagatgatccagcagatgctgtccacggtgctgaacatcatcatctttgaagactgtaggaaccagtggtctatgtcccgaccactacttggcttgatattgcttaatgaaaagtatttttctgacctaagaaacagtattgtgaacagccagccaccggagaagcagcaggccatgcacctgtgttttgagaacctgatggaaggcatcgagcgaaatcttcttacgaaaaacagagacaggttcacccagaacctgtcagcattccgtcgagaagtcaacgactcaatgaagaattccacttatggcgtgaatagcaatgacatgatgagctgacacctccttggactctacctgtacagagcagcgtccctttggtttggcccagaggggcgaacaattgcaagggagagggcctggctgatcctggctcttttctccaggggtgtggggaaaatggcaaaggtcaactagctgcttccccagggaataggggtgtgagtacactcactagggggcagggcgctgctggttcctgggggactgggtgggaagggtggtgggaggagataagagatacaaactgagactccagcctctcctcctggggccacccaagtggggagaacccctagtgtcctgccacaacctgccttgtataaacatgtacattttttcataacattttgaacaaggtttatattgactcaagtttaaaaacaaaaagtgtgactgaaaaatttttacagagtctagtgcaccaatgctgatgtgaggggttgtgtatgcgagtgaagaaaatgtgtattctggtggcctgaagctttactggacaaggatgtgtgagagtgcagagatatatttagtgacacagtagagaggcaaaaaaaaagctaaaattccaaatgtatattttttcgtattgccctgtcctcacccagaaatgatcaattcctgttactgtattaacccttgttattaggaactctaagccatgccagaacaccgtccctccccttggaccgtgtagattctgccctgggtccctagccccttgcagtgataaataactccagctaaaagtgtttggtgttcttatctccaccctctttcctactttgcttaccctcatcctcagacagatgcctcttgcttttaaaagttggatttaacgacgtgttgtagggttcttggtctgtgtgaaggcagagaccagagagaaggaagtgagcccactgctctcctgggagcaatgtgggtgagtccaccagaggccctgctgtgtgtggccaataaattttagtcttccccagccctcgaggcagtgtgtgtggatgtatgcgtgtggatatttatatatgtaccctgcactcatgaatgtatgaactggaggaagttactacagtggaagggttcttaataacaaggtctacctagcatgaagtatttaacattctcccatcccttaaaaaatatacatttttataaaatgaaaaccataataaatgttttgaatattaaaaaaaataataacctacagaggaaaattaatggagacagctatttgccttgtactttttccacaattgttgctgctagttgtacacatctctagttcagctcttgcccacgggacactcatcaattaggttttatttttatttctttcctctacccccagaaacaagcctgttaattttttttccttctcctctggcgactgtgtgatgaatcctttcttgcgtgatcaggttgcggatagacttgtaagggtgtttgctgcatacagtgtaagcattgtgaccgccaataaacttcaatggtttctactga

SEQ ID NO: 519 - protein, 1096 aa, Homo sapiens
MADHVQSLAQLENLCKQLYETTDTTTRLQAEKALVEFTNSPDCLSKCQLLLERGSSSYSQLLAATCLTKLVSRTNNPLPLEQRIDIRNYVLNYLATRPKLATFVTQALIQLYARITKLGWFDCQKDDYVFRNAITDVTRFLQDSVEYCIIGVTILSQLTNEINQVSATAFLIEADTTHPLTKHRKIASSFRDSSLFDIFTLSCNLLKQASGKNLNLNDESQHGLLMQLLKLTHNCLNFDFIGTSTDESSDDLCTVQIPTSWRSAFLDSSTLQLFFDLYHSIPPSFSPLVLSCLVQIASVRRSLFNNAERAKFLSHLVDGVKRILENPQSLSDPNNYHEFCRLLARLKSNYQLGELVKVENYPEVIRLIANFTVTSLQHWEFAPNSVHYLLSLWQRLAASVPYVKATEPHMLETYTPEVTKAYITSRLESVHIILRDGLEDPLEDTGLVQQQLDQLSTIGRCEYEKTCALLVQLFDQSAQSYQELLQSASASPMDIAVQEGRLTWLVYIIGAVIGGRVSFASTDEQDAMDGELVCRVLQLMNLTDSRLAQAGNEKLELAMLSFFEQFRKIYIGDQVQKSSKLYRRLSEVLGLNDETMVLSVFIGKIITNLKYWGRCEPITSKTLQLLNDLSIGYSSVRKLVKLSAVQFMLNNHTSEHFSFLGINNQSNLTDMRCRTTFYTALGRLLMVDLGEDEDQYEQFMLPLTAAFEAVAQMFSTNSFNEQEAKRTLVGLVRDLRGIAFAFNAKTSFMMLFEWIYPSYMPILQRAIELWYHDPACTTPVLKLMAELVHNRSQRLQFDVSSPNGILLFRETSKMITMYGNRILTLGEVPKDQVYALKLKGISICFSMLKAALSGSYVNFGVFRLYGDDALDNALQTFIKLLLSIPHSDLLDYPKLSQSYYSLLEVLTQDHMNFIASLEPHVIMYILSSISEGLTALDTMVCTGCCSCLDHIVTYLFKQLSRSTKKRTTPLNQESDRFLHIMQQHPEMIQQMLSTVLNIIIFEDCRNQWSMSRPLLGLILLNEKYFSDLRNSIVNSQPPEKQQAMHLCFENLMEGIERNLLTKNRDRFTQNLSAFRREVNDSMKNSTYGVNSNDMMS

SEQ ID NO: 520 - DNA, 105 bp, Homo sapiens
agaagttccttgaaagaaatagaaccaaatctgtttgctgatgaagattcacctgtgcatggtgatattcttgaatttcatggcccagaaggaacaggaaaaaca

SEQ ID NO: 521 - DNA, 4771 bp, Homo sapiens
agttggtgaatggcgttggtggcgggaaagttgagtctctcctgcgccgagccttcggggcgatgtgtagtgccttccatagggctgagtctgggaccgagctccttgcccgacttgaaggtagaagttccttgaaagaaatagaaccaaatctgtttgctgatgaagattcacctgtgcatggtgatattcttgaatttcatggcccagaaggaacaggaaaaacagaaatgctttatcacctaacagcacgatgtatacttcccaaatcagaaggtggcctggaagtagaagtcttatttattgatacagattaccactttgatatgctccggctagttacaattcttgagcacagactatcccaaagctctgaagaaataatcaaatactgcctgggaagattttttttggtgtactgcagtagtagcacccacttacttcttacactttactcactagaaagtatgttttgtagtcacccatctctctgccttttgattttggatagcctgtcagctttttactggatagaccgcgtcaatggaggagaaagtgtgaacttacaggagtctactctgaggaaatgttctcagtgcttagagaagcttgtaaatgactatcgcctggttctttttgcaacgacacaaactataatgcagaaagcctcgagctcatcagaagaaccttctcatgcctctcgacgactgtgtgatgtggacatagactacagaccttatctctgtaaggcatggcagcaactggtgaagcacaggatgtttttctccaaacaagatgattctcaaagcagcaaccaattttcattagtttcacgttgtttaaaaagtaacagtttaaaaaaacatttttttattattggagaaagtggggttgaattttgttgatatacatcataaaatagtcttttgcagggtactacgcaagccttaaaatttttcttaagacagagtcttgctctgtctcccaggctggagtgcagtggcacaatcatggctcactgcagccttgaactcctggcctcaagggatcctcctatgtgtgcctcctagagtgcagggattacaggcgtgagccactgctcgtggccaaaagttttctttttttttttttttctttttgaaacagtcttactctgtctcccaggctgctggagtgcagtggcacaatctcggcccgctgcagcctctgcctcttgggttcaagtgattcttccacctcagcctcccaggtagctgggattacaggcacccaccaccacgcctggctaatttttgtatttttaatagagacggggtttcaccatgttggccaggctggtctcgaactcctgacctcaagtgatccacccacctcggcctcccaaagtgctaggattacaggcccgtgcccagccctaaagttttaaactctaggggaattaacagtatttctttacagaatggatttgttaaactagcacagtaaaagtaaagactattctgtttctaggctgttgaatcaaagtgattttagcaattaaactttgtattaatttaccaccaatatttcttcacaaaggaacttttaaaagattatctcagaaagtaaatctgagaggtaagaagtaataatgagtaaatggtaagtacttgagtaaatctaaagaaatattgatagtaaggcaatcctaagcaaaaagaacaaagctggaggcatcacgctacccagcttcaaactatactacaaggctacagtaaccaaaacagcatagtactggcacaaaaacacacgtagactgatggaacagaatagagaatttagaaatgagaccacacacctataatttttttgatcttcgatgaacctgacaaaaacaagcaatgggcaatggattctctattcaataaatcgtgctgggataactggccagccatatggaaaagattgaaaatggacgccttccttatgccatatacaaaaattaactcaagatggattaaagacttaatgtaaaacccaaaacagtaaaaatcctggaagacaacccaggcagtaccattcaggacataggcacaggcaaagatttcatgacgaagacgccaaaaacaattgcaacagaagcaaaaattcacaaatgggatctaattaaactaaagagctgcacagcaaaagaaactatcaagagagtaaacagacagcttacagaatgggagaaaattgttgcaaactatgcatctgagaaaggtctgaaatccagcatctatacgtaatttaaacaaatttagaagaaaaaaccaccccattaaaaagtgggcaaaggacatgaacagacacttttcaaaagaagacatctgtggccaacaatcctatggaaaaaagcccagcatcactgatcattagagaaatgcaaatcgaaacaacaacgagataccatctcacaccagtccaaatggctattataaaaatgtcagaaaataacagatgctggtgaggttgtggagaaaaagatatgcttatacactgttggtggaaatgtaaattaaattagttcagccattgtggaagacagtgtggggataaagacagagataccattcaacccagcaatctcattactgggtatatacccaaaggaatagaaatcattgttataaagacacatgcacgcgtatgttcgttgcagcactgcccatcagtgacagactggattaaaaaaatgtggtacatacacaccagggaatactatacagccataaaaaggaacaagactgactgggcgtggtggctcatgcctgtgatcctagcactttgcgaggccgaggtgggtggattgcccgcgctcaggaggtcaagaccagcctgggcaacacggtgaaaccccatctctattaaaatacaaaaaattagctgggcatggtggtgcgtgcctgtagtgccagctactcaggaggccgaggcaggagaattgctggaacccaggaggtggaggttgcagtgagctgagatcgcgccattgcactcccgcctgggcgactccatctctaaaaaataaaaaataaaatataaggaacaagatcatacctttgccagggacatggatggagctggacgctattatccttagcaaactaacataggaacagaaaaccagatactgcatgttttcacttataagtgggagctaaatgatgagaactcctggatacaaagaagggaacaacacacacacacacacacacacacaccctctcacagacttagaatacgtggcaagaaaagcatataatttgacattaggagcagaagaattagtgtgctaaggtccttgcattgtccgggagaaggggaaaagtatcaacattagacattgataaagggtctgcaccttttgatttcttaaccactcaaggatagaaaaggggcataactttaaaatgaaacaggaaaatggtgggctgatttttaaatttaaaagaaccgaatacagcaggacagatccaaagcacagaggagatggtgtatttaactccatccacaccaatcattacattacatgcaaagggactgaggactccagttaaaatgacagttttaggctggtttttaaaatacatatttgctgttttatttttagagacaaggtctcgctccgttgcccaggctggagtgcagtggcatcataactcactgcagcctcgaactcctgggttccagtgagcctccacctcagcctccaaagtagctgtgattacaggtgtgtgccaccttgcctagctgagtcccttgaattgataaaaggtatatacaaaaatccctcagtaaacattagttaatagtgaaatattagaagtgtctcttttaaaatcaagaacaagagtgcctgctattactacttgtattcaacattgtactgaaagtgtcaacacagtaaagcaaggaaaatgaaaaagcatgaaaaaaaggcatatggaagaaacaaaactgtcattctttaaaggttagatgattgtatgtatggaaatccaatatcatctataagcagattattagaattaagagtttagcaaatttgcgagctaaaacatcaacatttaagtttttctaagtaccagcaacagaattaaaaaatagaattttaggctgagtgcagtggctcacaactgtaatcccagcactttgggaggccaaggagggaggattgcttgagtcctaggagttcaagaccagcctgggcaacatagtgtaagaccctgtctctataaaaataaattttaaaaaagaaaatggaattttaaatatatataatatttaatcataactaaaaatataaagtttctagaaataaatctaataaaaatatgcaagacctttttggagaaaattacaaagctttattgtaagaagcagagtttaacccttttcccatttagaaaaaaaaagtgcagctcactgccagcgctcatttaattttacgtaaacacactcttggaggctgaagcaaatcttactgattttcaatgtgaaaataaaatataaaaactattcttggagttatttctaaacagaactaacatcagaatcatctgaatcatcagaatcatctctttcagaaaaatcggactcatcgaatgaatcttcggctaactgttgagaacgatgttaacatcacgtgtaggaatactacattttccaggatttgacattttcagcgatcaagaattactatgttttgtaaatggaaataccactactaaagacagaatgctataaa

SEQ ID NO: 522 - protein, 280 aa, Homo sapiens
MCSAFHRAESGTELLARLEGRSSLKEIEPNLFADEDSPVHGDILEFHGPEGTGKTEMLYHLTARCILPKSEGGLEVEVLFIDTDYHFDMLRLVTILEHRLSQSSEEIIKYCLGRFFLVYCSSSTHLLLTLYSLESMFCSHPSLCLLILDSLSAFYWIDRVNGGESVNLQESTLRKCSQCLEKLVNDYRLVLFATTQTIMQKASSSSEEPSHASRRLCDVDIDYRPYLCKAWQQLVKHRMFFSKQDDSQSSNQFSLVSRCLKSNSLKKHFFIIGESGVEFC

SEQ ID NO: 523 - DNA, 105 bp, Homo sapiens
taccctcccgagtgcctggatctcagcaatggggataccattctggaagacttgcccatccaatctggtgacatgctgatcattgaagaagaccaaaccaggccc

SEQ ID NO: 524 - DNA, 6265 bp, Homo sapiens
ccgcaccgaagcgtcgcgataactgcaaccacccgcaacttctcgcgatgtttggccccgctaaaggtcgccattttggagtccacccggcgcctggtttccccggcggcgtctcccaacaggctgccgggaccaaagctggccccgcgggtgcctggcctgtgggcagccggaccgacacgatgtggcggctccgctgcaaggccaaggacggcacccatgttttgcaggggctgtccagccggacccgggtgcgggaactccagggccaaattgccgccatcaccgggatcgcccccggcggtcagcgaatcctcgtcggataccctcccgagtgcctggatctcagcaatggggataccattctggaagacttgcccatccaatctggtgacatgctgatcattgaagaagaccaaaccaggcccagaagttcacctgcatttactaaacgtggtgcttctagttacgtcagggaaactttgcctgtgcttaccagaaccgtggtcccagcagacaactcttgcctctttactagtgtgtactatgtcgtcgaaggaggagtcttgaatccagcttgtgcccctgagatgagacgcctcatagcacaaattgtagcaagcgatccagacttctatagtgaggcaatactgggaaaaacaaatcaagagtactgtgactggatcaaaagggatgacacttggggaggagcaatagagatatcgattttgtccaagttttaccaatgtgaaatatgtgtagtggatacacagacagtaagaattgatcgttttggggaagatgcaggatataccaaaagggttctgcttatttatgatggcatccactatgatccacttcagcgtaacttccctgatccagatacacctcctctgaccattttctcctctaatgatgatattgttcttgtacaagcactggaattagcagatgaagctagaagaaggagacagtttactgatgtcaaccgcttcaccctgagatgcatggtatgtcagaaaggattaactggacaagcagaagcaagggaacatgccaaggagacaggccataccaactttggagaagtgtgacctatgcatgaatgagggttgaagcctactacctcacacatccagaaggctctgggttttccaataagctatggtaaccctaaagaacaaaggatacaatgcttgaaccatccttttaacttaaaaccactaagacactgaaattccttgttaagattaaaattagtgtgcaagtttacagatgtgtgtctacagtggtaaactgtacatacatgcctctttctgctggagtgacagaataggtgatccttgccacctactgacactgacctgaaggttgagattgagtattataaactagcacccagcagctttaacttgtagaagaaagcatcacattttgggtaatgtggaaggcctcctgtgagtccactgggcatacgattgagattgagtattataaactagcacccagcagctttaacttgtagaagaaagcatcacattttgggtaatgtggaaggcctcctgtgagtccactggacatttaccacagtgtctccagtaactgagtctttttaaaaactctgaatgagttaagtttctaaattatgaattgattcatcaaatgaagatactcagaattgtccaaactgattttatattgcaatttggtagacattataaatgtgtgcttaaccactgataagtacatcacaagcaatttttacagggatgagtctcatccttgagaatgttatcacaaaacaggaactgattgtgccctgtttaagatctctagcatataaaacgtagaatgtatgagggaataggtgcctgagcagcttcctgaagctttaaaagaccgttggcctcgtgttttaatgcaattcatgtattggtctttgtcacattggataacattttaaagttaagcagggtacttttttaattgaaattccttgaaattcgagtcctcagttttttcttcatttgcgtaaagtttatcggggggaatttaattttctcagctttttgttaagagcacttcctccaaaaaatttttttcaagtaataatgctctgctttgggttggtttttgtaagattttttgcacacctaaagagtgtttgcttttgtgctagccttatccctccactaaagttattttaaataatttcacatttctgcaaattagcactttgcttatctgcaatcttttactttgatttttgaagttttaaagcaattggagtaatactgttgaatgaactagtttcacttccaaaatagaaaaaattgtaaatccttgccttatgcagctttctcagaattctgcttcttcctagtactagatgtgtagccatttgcttagtggactaatccgcaaggcacaccctctaaaacttagcttcactacaagatcttccagataaaagttttctacctcttttcttaattattctgatcagggatgctaaattataatttgttatgtattatctcacataatgtgaagaggcttaatgtgaagttttgttattttggtctcttttttattaagtatctcacttagaaattcagtggtatactttaaagcacttggatctttttcagcatatctgcctagcaaatgttttaaaattgacatttatttttagcactttcacttggtgaaggtggccatataaaattaaggaacatttgaacaatataagagaaaagaacttttaaggaacaattcacaaagtttgtttgaaattgtcagatgacatttcttgagtaccttttgtgtgcatagttattttagacaatataagctgttatggtcagcataacttaaaagtgtttagttttctattttactgagccttaaaaatagcactgatgagcttatgatacttaatgtttggcaatcataatgtgttcaaattaatgggattgaaaatctctccacacctgactctcatctgatctggatggttttggttttgtatcttttttacttctcccagaaaatactaaatttaaaactgtaaattaagaatataccactagataacaattatcaaattgagctttatgcatcattactcagaaagcttgccttcctttctttgctacttcaggacacagagttgacatttgcttactacagctttagatctagaagtttattcgtgcaacaaatatttattgagtaatttatactgtgccaggcatgttttgatatgtttctgtcatatgttttgatatgttccaacataagtttctgtcactttatattcagtatatattttctacagtgggtaaatttaacaaatggaaaggaatagaacactgatattttacagaattaaaccccttcattgtaagggctttgtttacatattaagtgtcaagtatttattcaggggatcttatttcattgtattttatctgttatctaggttgtccatttaccggttggacactgatactctgtcaaattcctttcaaaaatgactctttagtctgctgaaatttagcactagtactttagtgttctgatcctggaaaattcaaggtgaagctttatttgtggaccatctgatttaattattgaggattaaaaacctaaacctttgctcattctaaactcaagcttttaagcctcacagaatttacaggggtttgctttttgtttgtttgttttttcattttttactgtgcttattaaactcttggaattagttattaaagggagtaaattctcatcttgggaattttgaaaatctatggacttacaactttcaggaggattaaatgtcttaagttttgtactagagcagaatgaaatctttcctattcattgagtttttgcctgccatagaggaatttttttaaaaattaaaatgacagtttatattagtggcaaagtgaataaagacctcactttcccaccccacccttcttcctttctcttacttttctttggattaaaggtcaggtgtagtactatgaagattcactcctgaataaagtgatttcagaagctaaaatttaacatacctggaaattttgtgatgtgttagccaagtgaagacattagtgtgttccatcttttgctaatggttcatggttgatttcttcattgtttcccatgaaattagcatagtcaagtggtacccttgacgcttgactgctggtcagtttgaccctgtttttaacaactaatgtagtcatgccgcttgattattccatgaagtcccagcaaaataataatgaggaattaactaacattatgttatctatctaatttgtctgtgtccctaaatgcccatgcctaacttgcttctctagtttattccttctgtggagggattaaaacgtgggtgttgcaagttgccctaagctaaacatagttttcttacatctttttgggaaaaaaaatggaatgggaagtatgcaagattaagcaagagtgatttttttttttttttgacaaatcaggtggccttcctaaacatactaagaattatgttctttcatgtgtggagacacatttgtttgcagcactttaaaaaatatatatggaataaaagtttacatgttggccctctagggatctaattaaggacattaaagtacaattcttgagctactaaccatcagctcttcttaatcaaagattgccatcagtgtagagtgtatctattggcacaacattctggtgttttgataacagtagaactcaatttcagtaactattaggagcatggtctgtgccctagcattaaaaatgttacttattattatgtgaatatcttgtattattatacaatgcagtattcaaatttgtccttgtagtgcagagatgactgataatttctaaaagattcgatccttaaaacttgtttccaagcagacttataaggaagctgatttttgagtcagaggccttaaacgtgtcatatacaagtggcatcattttaagtccaaagtgaaacacttgatttgaataagctagtttataaactaaagctgttttcttatgttacagtatttcagcacatttcattccacataaaaagaatattaagtgtccctggttgtgggagagtgtttatttttctcaaaattatctagcattttgcttacagtgctttgaatgtttgacttaaaattattattgatgttgaattgtagggtgctgatttaggtcttgattcatacacatttaaaggaggttggtaaccccctcatggtagagtgaagggagaaaagggccaagaagacaaagtaccactgataaagaagagattgtcaaatagatgcattcctagtcatgaattacccttttccaaacatttttaaagcaatgcctttgtgtcaactcaacccttcttccccatttcttgtcatagaatgtagcatggccataggtgaaaaagcttatcattaaagtatgaaaccatgaattataagcattttgccatgatgcccttttatacatatgtttttaaaagtactaaccaacatataggagtttaggaatggtgaagatataatttgattaagttgtaggtaaacagaaaggatcatcttaggctcagaatttctaatatgattacatgagtctactttataaactggtataggctatgtaattagcccgtaagttacttaaaggaccaggggacctaatttttgtcagttttccagtcacattggtgccattcaggactccagctgtttacaggaaatatgtacttagcagaatagtatttttccttgaaaaaaatttgaattcagcctaaatacagaatgaatatgaatagtttgtgaaaagggttagagaacaacaatattcctatagtttctgtattaatgcagtagagacagaggttcctaacgcaaaaagaaaaccacaagtaaagaccgtcaaattagagctttagaatatgacttgaaaaagtagggatgggcaaaacagcataagaaaatattttttcttaatgcagatggacagtgttttcttgttttaaaaatgttttgcctatttgccagcattttttgaagtaatacactgctgctacctggaagatgtctaacttcattttctacaactcttatgtgattttgccattgtcattaagatgcattgattttatttatgaggtgtatgactttaaatatctaaatgctgtattaagtgacttgtttcaaaggaataaatgaagtgaaaacgt

SEQ ID NO: 525 - protein, 348 aa, Homo sapiens
MFGPAKGRHFGVHPAPGFPGGVSQQAAGTKAGPAGAWPVGSRTDTMWRLRCKAKDGTHVLQGLSSRTRVRELQGQIAAITGIAPGGQRILVGYPPECLDLSNGDTILEDLPIQSGDMLIIEEDQTRPRSSPAFTKRGASSYVRETLPVLTRTVVPADNSCLFTSVYYVVEGGVLNPACAPEMRRLIAQIVASDPDFYSEAILGKTNQEYCDWIKRDDTWGGAIEISILSKFYQCEICVVDTQTVRIDRFGEDAGYTKRVLLIYDGIHYDPLQRNFPDPDTPPLTIFSSNDDIVLVQALELADEARRRRQFTDVNRFTLRCMVCQKGLTGQAEAREHAKETGHTNFGEV

SEQ ID NO: 526 - DNA, 99 bp, Homo sapiens
agccaaactcattttttgatggaataggagctgatgctacacacatggatggtgatcagattgttgtggaaatacaagaagcagtttttgtttctaata

SEQ ID NO: 527 - DNA, 5336 bp, Homo sapiens
agtgctccagagaaaggccgtcctgcagcacccgccgctgtcgccgaccgcccgcacatccgtcgggtgagtcccgcgtgcccccgcggccgcggggcctagtgcgcgcgcagtaacctgtttgtggcctggtcggcgtcccgtagggcgccctcccgcgctaggccggccggcgtggcgctcggcgccgaacaggccccgaggaggccgcagttaggcctagtgattatccagttgccctgagcggctgcggaggtgcgctccataagcgggcagggtgggaaaagttcgcccgtttgtccggaaggcagttgatggacctggggtcgacaccactgcggacgcagggcacggcacgggggcgagaaggcgaaggctgcaggcgtgaggagctgtgactaatgagaattaaaggccatggatgaagatgaatttgaattgcagccacaagagccaaactcattttttgatggaataggagctgatgctacacacatggatggtgatcagattgttgtggaaatacaagaagcagtttttgtttctaatattgtggattctgacataactgtgcataactttgttcctgatgacccagactcagttgtaatccaagatgttgttgaagatgttgtcatagaggaggatgttcagtgctcagatatcttagaagaggcagatgtatctgaaaatgtcatcattcctgagcaagtgctggactcagatgtaactgaagaagtttctttaccacactgcacagtcccagatgatgttttagcttctgacattacttcaacctcaatgtctatgccagaacatgttttaacgagtgaatccatgcatgtgtgtgacattggacatgttgaacatatggtgcatgatagtgtagtggaagcagaaatcattactgatcctctgacgagtgacatagtttcagaagaagtattggtagcagactgtgcccctgaagcagtcatagatgccagcgggatctcagtggaccagcaagataatgacaaagccagctgtgaggactacctaatgatttcgttggatgatgctggcaaaatagaacatgatggttccactggagtgaccatcgatgcagaatcagaaatggatccttgtaaagtggatagcacttgtcctgaagtcatcaaggtgtacatttttaaagctgaccctggagaagatgacttaggtggaactgtagacattgtggagagtgaacctgaaaatgatcatggagttgaactacttgatcagaacagcagtattcgtgttcccagggaaaagatggtttatatgactgtcaatgactctcaacaagaagatgaagatttaaatgttgctgaaattgctgatgaagtttatatggaagtgatcgtaggagaggaggatgctgctgttgcagcagcagcagctgctgtgcatgagcagcaaattgatgaggatgaaatgaaaaccttcgtaccaattgcatgggcagcagcttatggtaataattctgatggaattgaaaaccggaatggcactgcaagtgccctcttgcacatagatgagtctgctggccttggcagactggctaaacagaaaccaaagaaaaagagaagacctgattccaggcagtaccaaacagcaataattattggccctgatggtcatcctttgactgtctatccttgcatgatttgtgggaagaagtttaagtcgaggggttttttgaaaagacacatgaaaaaccatcctgaacaccttgccaagaagaagtaccactgtactgactgtgattacactaccaataagaagataagtttacataaccacctggagagccacaagctgaccagcaaggcagagaaggccattgaatgtgatgagtgtgggaagcatttttctcatgcaggggctttgtttactcacaaaatggtgcataaggaaaaaggggccaacaaaatgcacaagtgtaaattctgtgaatatgagacagctgaacaggggttattgaatcgccacctcttggcagtccacagcaagaactttcctcatatttgtgtggagtgtggtaaaggtttccgacacccgtcggaactgagaaagcacatgcgaatccataccggcgagaagccataccaatgccagtactgtgaatataggtctgcagactcttctaacttgaaaacacatataaaaacaaagcatagtaaagagatgccattcaagtgtgacatttgtcttctgactttctcagataccaaagaagtgcagcaacatactcttgtccaccaagaaagcaaaacacatcagtgtttgcattgcgaccacaagagttcaaactcaagtgatttgaaacgacatgtaatttcagttcatacgaaagactatcctcataagtgtgagatgtgcgagaaaggctttcacaggccttcagaacttaagaaacatgtggctgtccacaaaggtaaaaaaatgcaccaatgtagacattgtgactttaagattgcagacccatttgttctaagtcgccatattctctcagttcacacaaaggatcttccatttaggtgtaagagatgtagaaagggatttaggcaacaaaatgagcttaaaaagcatatgaagacacacagtggcaggaaagtatatcagtgtgagtactgtgagtatagcactacagatgcctcaggctttaaacggcacgttatttccattcatacaaaagactatcctcatcggtgtgagtactgcaagaaaggcttccgaagaccttcagaaaagaaccagcacataatgagacaccataaagaagttggtctgccctaacagtgtgtctacaagcttgtaaagatgttggccttgaagcagaaaattcattttttaaagccagtcttgttcacatccattactatacattgaattatgctgtgtaaaaatagaattattgcttctagtccacttttctttacattttattcaatacgctgtcctgaatcctattcagtttctttaatagatgaggaaaaatagcaacaagcaagttgcttataataaaataatttgtgattctatactgaattttcagtcataaaagctttactatttatttacatatttattcatgttcatggtactcttctaagacaaaatcagattgataactatgaaagtaacatttttgacccatttcctcctacacaagtgtttcacattggagacatctgctaatataaatgggaggttttactgtcaagtccaattagcaaaacgtggtaataatttttttgtcagtattttcagattacatgataaaattttacatttgagcttctagcattgattaatataggatattgaccacgtttatgtttaaatttcattttgttcagcagacaaaatgtacttcccttaactttcattaatagtgtttacatcttttgtcagcacagcaaacttttagaaagtaatagttttacttatttttatcttctgttttctctttgtactgctttgtcttgcattgtgttccaacacatgagacttactgctcactgaattttggagtcttttagaggtaaattgtggactcaggattttttgaaacttggtgtgtaactctaaatcttgtatatgcatctttgttgcttattacatatttacacacacaaccacaaattttaaacttatgatgaaaatttacaataacctgaaagatccagagatgtatgagagcattttgtaacttgttattcagttactaaatttgaggtgaataattaaaaagaaaaggacattaggagagtgaaaatcttctcttcaaataatctttgatagataaaaatggaaggtaagatgtttctagatagaatgttttcatacaatttcagcttcatatcataaatttttctggaaagctatttcagacatagatttcatagtatttttctgagaatcctgtgaaggaacgctgtctctttgcaaagtaaggaggactaagggaaaatgatggtaccatgtaacagaatgagagctaattccaaattagcaacttcatcctgctttctattttacattgagtaaagttttaaaaagacaacagtcaagttgattttgattagaagataaaagtacataatgaaaatccatggccttatttggaatatatatcactttccaaattttattatttatttgagagttaataagttaatgttattaagcagttaataatttatatgtatggatataatataaaatgaattcatataattaaaaagaatttggttaataagaatttggagaatggaaaatacatttttaggttccttaatttggctgttggtacctgtgtatttggaatattttaggggattcgaattttttttaacccacattacagctaccttctagctttagtatggtagtgcttcattcaacttttgctgtcaggtttttattttcacctttttctgtgccaccaattcaaaagttataggattaggaaatataaatttatatttggtgattggcagcctctgaaatgttagattaatttgatctagttctaaagtgctttagtcatatatgaatttaaacctagtaccatccaaaaccatgtaatggattttaagaatctgttaggccttcttagcctttatacatgtccctacctgatttttactgtccttcatgatcctgttcttgaaaacttcagtttgtatttgagaatcctttaaatctccttccaatttgttttctccctgaagtaatataaaaggaagtatttaagtgaaagtttaagagttttaaaacattctttaaaattaatacagatagttagctatttatcttttaaaaataaactaaggtaaaaaacgtgacactttacatatttcatatttttcatatagtctggaggtatacacagttgttttgtttttaaccacggtattgaaacctttaaaaggtaattaagcatttggtcaagtaaatatagaacatttgtataaagaaagaaatgaaattgtgcttaatgttatatactgttattatttgcaggctggttttaattcttaatttgattagcaaagctaaaaaagtggatgttgaagttgaaagttttaaagaggtacaaaatcttacaaggacataaattattatttggttgaaaaatagcctattagatattgtatgtcccttcctctgtacaaattgtaaaatacttaaaataactatgaagaattcatataggaagtgtgatactattgtaaatgtgtatttgagaatatgcaaaaataaaaataatattttactgttaataaatgtttacttgtatatga

SEQ ID NO: 528 - protein, 801 aa, Homo sapiens
MDEDEFELQPQEPNSFFDGIGADATHMDGDQIVVEIQEAVFVSNIVDSDITVHNFVPDDPDSVVIQDVVEDVVIEEDVQCSDILEEADVSENVIIPEQVLDSDVTEEVSLPHCTVPDDVLASDITSTSMSMPEHVLTSESMHVCDIGHVEHMVHDSVVEAEIITDPLTSDIVSEEVLVADCAPEAVIDASGISVDQQDNDKASCEDYLMISLDDAGKIEHDGSTGVTIDAESEMDPCKVDSTCPEVIKVYIFKADPGEDDLGGTVDIVESEPENDHGVELLDQNSSIRVPREKMVYMTVNDSQQEDEDLNVAEIADEVYMEVIVGEEDAAVAAAAAAVHEQQIDEDEMKTFVPIAWAAAYGNNSDGIENRNGTASALLHIDESAGLGRLAKQKPKKKRRPDSRQYQTAIIIGPDGHPLTVYPCMICGKKFKSRGFLKRHMKNHPEHLAKKKYHCTDCDYTTNKKISLHNHLESHKLTSKAEKAIECDECGKHFSHAGALFTHKMVHKEKGANKMHKCKFCEYETAEQGLLNRHLLAVHSKNFPHICVECGKGFRHPSELRKHMRIHTGEKPYQCQYCEYRSADSSNLKTHIKTKHSKEMPFKCDICLLTFSDTKEVQQHTLVHQESKTHQCLHCDHKSSNSSDLKRHVISVHTKDYPHKCEMCEKGFHRPSELKKHVAVHKGKKMHQCRHCDFKIADPFVLSRHILSVHTKDLPFRCKRCRKGFRQQNELKKHMKTHSGRKVYQCEYCEYSTTDASGFKRHVISIHTKDYPHRCEYCKKGFRRPSEKNQHIMRHHKEVGLP

SEQ ID NO: 529 - DNA, 105 bp, Homo sapiens
cagttagaagatggtaccacagcatttattcaccacacctccaaagatagttatgaccagagtgcattacaggcggttcagctggaagatggtaccacagcttat

SEQ ID NO: 530 - DNA, 2900 bp, Homo sapiens
acggctgtttcctgtcctggtgcatggtggtcggacgaaggaattgttggaaaattttctcggaggtagaagatgttgttagcccaaataaatcgagattctcagggaatgacagagtttcctggaggagggatggaggcgcaacatgttacgctgtgcttgacagaggcagtcaccgtggcagatggtgacaacttagaaaatatggaaggcgtaagcttgcaagcagtaacacttgcagatggttctactgcttacatacaacacaattctaaagatgcaaaactcatagatggccaggtcattcagttggaagatggttctgcggcctatgttcaacatgtacccatacctaaaagtacaggggacagtttgcgtctagaggatggtcaagcagtacagttagaagatggtaccacagcatttattcaccacacctccaaagatagttatgaccagagtgcattacaggcggttcagctggaagatggtaccacagcttatatccaccatgcagtgcaagtcccgcagtctgacaccatcttggcaattcaggctgatgggacagtggcaggtctgcacactggggatgctacaattgaccctgacaccatcagtgctttggaacagtatgcagcaaaggtgtccattgatggaagtgaaagtgtagcaggtactggaatgattggagaaaatgagcaagagaaaaaaatgcagattgttttacaaggacatgctacaagagtaactgctaaatctcaacagagtggagagaaggcatttcgatgtgaatatgatggatgtggaaaattatatacaacagctcatcatctcaaggtccatgagaggtcacacacaggagatcggccttatcagtgtgagcatgcaggctgtgggaaggcatttgcaacaggttatggattaaaaagtcacgtcagaactcatacaggagaaaagccatatcggtgttcggaagataattgtactaaatctttcaaaacttcaggagatctacagaaacacatcagaactcatacaggagaaaggccctttaagtgtcccttcgaaggctgcggtcggtcctttacaacatcaaatatcagaaaagtgcacgttaggacacacacaggagaaagaccttattactgcacagagccaggatgtgggagggcatttgccagtgcaacaaattataaaaaccatgtgaggatacacacaggagaaaagccatatgtttgtacagttcctgggtgtgacaaaaggtttacagaatattccagtttgtacaaacatcatgttgtccacactcattccaaaccttacaactgtaaccactgtgggaagacatacaagcagatctccacgctggccatgcacaaacggacagcccacaacgacactgagcccatcgaggaggagcaggaagccttctttgagccgcccccaggtcaaggtgaagatgttcttaaagggtcccagattacgtatgttacaggtgtagaaggggacgacgttgtttctacacaagtagccacagtaacccaatctggactgagtcaacaagttacactcatatcccaggatgggactcagcatgtcaacatatctcaagctgacatgcaggccattggcaacaccatcacaatggtaacgcaggatggcacgcccatcacagtccccgcccatgatgcagtcatctcctcagcaggaacgcactctgttgctatggttactgctgagggtacagaaggggaacaggttgcaattgtagctcaagacttggcagcattccatactgcctcatcagaaatggggcaccagcagcatagccatcacttagtaaccacagaaaccagacctctgaccttagtagcaacatccaatggcacccagattgcagttcagcttggagaacagccatctctggaagaagccatcagaatagcgtctagaatccaacaaggagaaacgccagggttggatgattaatcctcagaacaatggagcaataaagcagaaggagtctttcatcttctggcagcagaaatccatgaagcccgggcccaggaaaattagaagttttccattcctgatacactgtacacatttttatgcgagagtggagaacattttattcttgacacttttgtgtatataacccttggaatagattctcagagtgattcattgtgtacaaggaagtatgaaattagggcaatacagtaaattttcatgttactcttttatcagatcacaaactcctagagtctacatgcaagactagtaaagtcttatggagtcttatgatggatttttaacttcccgtggaaaaaaaaataaaggctgtatctaaaatatcaaaggttctatatgtcacacaatcgtaattccaaaagccattatggataataaagggtgtaaagccttcagatatttccccagttagtagagtgtctgcggtttttgttctactatatgcttgtccatttttatttgtatctcatggtttgcagactgtttgaataatttatagtttcccatccctgttaaaaaccagctcttcaagctgaaatgctaattatattggcattacattgaattatgtacaaaattataaaatttggttatttaaaattaaaaagttaaatccagtggttttgttaaagattttgcttagtattcaatttttattactgttttttaaaaataatgaatcatcaaagtttaaccacaggctggtgcccgggataacagtactgtaattggaaatggctttactctgaaaattaggttagtgggttggtgtaaattatttatttttgcttatgtacttttgttttaaagcttatttaccccaaagtttattattaattttgaatacagcaatttttaaaatgtta

SEQ ID NO: 531 - protein, 638 aa, Homo sapiens
MLLAQINRDSQGMTEFPGGGMEAQHVTLCLTEAVTVADGDNLENMEGVSLQAVTLADGSTAYIQHNSKDAKLIDGQVIQLEDGSAAYVQHVPIPKSTGDSLRLEDGQAVQLEDGTTAFIHHTSKDSYDQSALQAVQLEDGTTAYIHHAVQVPQSDTILAIQADGTVAGLHTGDATIDPDTISALEQYAAKVSIDGSESVAGTGMIGENEQEKKMQIVLQGHATRVTAKSQQSGEKAFRCEYDGCGKLYTTAHHLKVHERSHTGDRPYQCEHAGCGKAFATGYGLKSHVRTHTGEKPYRCSEDNCTKSFKTSGDLQKHIRTHTGERPFKCPFEGCGRSFTTSNIRKVHVRTHTGERPYYCTEPGCGRAFASATNYKNHVRIHTGEKPYVCTVPGCDKRFTEYSSLYKHHVVHTHSKPYNCNHCGKTYKQISTLAMHKRTAHNDTEPIEEEQEAFFEPPPGQGEDVLKGSQITYVTGVEGDDVVSTQVATVTQSGLSQQVTLISQDGTQHVNISQADMQAIGNTITMVTQDGTPITVPAHDAVISSAGTHSVAMVTAEGTEGEQVAIVAQDLAAFHTASSEMGHQQHSHHLVTTETRPLTLVATSNGTQIAVQLGEQPSLEEAIRIASRIQQGETPGLDD

SEQ ID NO: 532 - DNA, 104 bp, Homo sapiens
caccttgtccctgtactccgggaaggacagtgattctgtgaagctgctggaggagtacgcagattcggagtctcaggcatccttacaagacctggggctaggtg

SEQ ID NO: 533 - DNA, 4886 bp, Homo sapiens
gggaggccgctgggagccccgcgaggcgccaggcgcgaggcccggcgcgcgagcccccgggggcggggcaaaagaaattgggagtatcctgcatttaccactcagtgttccaggaggacatatccagtggtctgcttgtcacctgaaccccctccctgtggggcctaaactgggtcctcctgttccctggagattcactaacttgctcttctggaattagttgccatcaagggctctctcctccctgtctccttacatggttttgcttatctggagagtagcttttggccaagacctggcagtggagagccatggaccagtacagccttggagacgagggtgccctcccatcagaaatgcacctcccttcattttcagagagccaagggctcaactgcagcgacaccctcaaccgggatttgggtcccaacacgcgaggctttctttatgctggcctgagtggtctggacccggaccccagcctcccaacgcctgacatgtccagcgaggtgctggaggacaacttagacaccttgtccctgtactccgggaaggacagtgattctgtgaagctgctggaggagtacgcagattcggagtctcaggcatccttacaagacctggggctaggtgtgcttaaggctaaagaggctgacgaaggaggaagggccacctcggggagtgccaggaaaggaaagcggcagcacagttcccctcaaaacccacttctggactgcagcctgtgcgggaaggtgttcagcagcgccagttctctgagcaagcactacctgacacacagccaggaaaggaagcacgtctgcaaaatctgcagcaaggcctttaagcgccaggaccacctgaccgggcacatgctcacccaccagaagacaaagcccttcgtgtgcatcgagcagggctgcagcaagagctactgcgactaccgctctctgcgccggcactacgaggtccatcacggcctgtgcatcctgaaggaagcccccccggaggaagaggcctgcggggactccccccacgcccacgagtcggccggccagccgccccccagcagcctgcggtccctggtgcccccagaggccaggtcccccggctccctcctgccccaccgggacctcctgcgccgcatcgtgagtagcatcgtccaccagaagaccccttctcctggcccagccccggcgggggcttcagacagcgaagggaggaacactgcctgtccctgccccgcctcatcggggtcctcgtcctgcaccccagccggcccccacgcggccccagcagcgctggacaccgagcttcccgaggagccttgcctcccacagaaagagccggccactgacgtgttcacagcccctaattccagggccgccgagaacggcgcccccgacccgccagagccggagccagataccgcgctgctccaggcccggtccaccgcggagtgctggcccgaaggcggctccgtgcctgcctgcctgcctctcttccgaggccagacggtccctgccagttcccagccatcgagccacagcttccagtggctccggaacctgccgggctgtcccaaaagcaaaggcaacaacgtgtttgttgtccacaagccctcggccgtgccctcgcgggagggctccgagtctggcccgggacccagcagcggaagcccctcggaggagtccccgcccggccccggcggtggcctggaggatgctctgcccttccctgccgcgctcctcagggtccccgcggaggccccgagcgaccccaggtcggccagcggggaagatgacccctgcgcccccaagaaggtcaaggtcgactgcgactccttcctgtgccagaaccccggggagcccggcctccaggaggcccagaaggcaggcgggctccctgcggatgcctcgccgctcttccgccagctcttcctcaagtcgcaggaacctcttgtgagccacgagcagatgcaggtgttccagatgatcaccaagtcccagcggatcttctcccatgcccaggtggcagcagtctcctcccagctccctgcgcccgagggcaaaccagccgccctgaggccgctgcaggggccgtggccgcagcagcccccaccactggctcctgctgtggactctctccacgccggccctggaaaccccgaggcagagggctccccagcccgcaggagaaaaaccacacccggggttcccagagaggcctcccccggcagcacgagacgagacgcaaaggggggactgaaagtggccgcggttccaacgccccttgcagcaccgtctctggacccttccaggaatccagacatctcttctctggccaagcagctgcgatcctctaaagggaccttggacctggaggacatcttcccctccacaggccaacggcagacccagttaggtggggaggagccaccaggagcctcgctgccagggaagcaggccccagccgagaatggcgcggcttcaaggatcacaaaaggtgaaaagggcccagcctgctcccggggtggaggctaccggctcttgggcaaccccagggccccgcgattctccggcttccggaaagagaaggcgaagatggatatgtgctgtgcggcttctccgagccaggtagccatggcctccttctcatcggccgggcccccggcagatccctccaagtccaagctgacaatattcagcagaatccagggtggaaacatctacaggctcccccatccggtgaaggaagagaatgtggcaggcagaggtaaccagcaaaacggcagtcccacagactggacgaagcccaggagcacttttgtctgcaagaactgcagccagatgttttatacggagaaagggctgagcagccacatgtgttttcacagcgaccagtggccgtcacctcgagggaagcaggaaccgcaggtgtttggcacagagttttgcaagccgctaagacaggtgctgaggccagaaggggacaggcatagtcccccaggaaccaagaagcccttggaccccacagctgcagcccctttggtggtcccccaatcgatccccgtggttccagtgacccgacacatagggagcatggccatgggacaagagaaagacggggaggagcgagacagcaaggagagcagccagcagagaaagcggaagaagcggcccccaccctccacggctggggagcctggccctgcaggatgccaccagagccgcctgcggtcacccatgttcctggtggactgcctcctgaagggcttattccagtgctccccctacacaccacccccaatgctcagccccatccgggagggctctggggtgtacttcaacaccctctgttccacgtccactcaggccagccctgaccagctcatcagctccatgctcgatcaagtggatgggtcctttggcatctgtgtggtgaaggatgacaccaaaatcagcattgagccacatatcaatataggaagccggtttcaggcagagatcccggaactccaggagagatccctggctggaactgacgagcatgtagcttctctggtctggaagccatggggagatatgatgatcagctcagagacacaggatagagtgaccgagctctgcaatgtggcatgctccagcgtgatgccaggagggggcaccaacctggagctcgctctgcactgcctgcacgaggctcagggcaacgttcaggtcgccctggagactcttctgctccgagggccccacaagccacggacacacctgctcgctgactatcgctacacaggttcagacgtctggacccctatagagaagaggctttttaagaaggcgttctatgcccacaagaaggacttctacttgatacacaagatgatccagacaaagacggtagctcagtgcgttgagtattattacatctggaaaaaaatgatcaagtttgactgtggccgagccccagggctagaaaagagggtcaagagagagccggaggaagtggaaaggacagaggaaaaggtcccatgcagccctcgggagagacccagccaccatccaactcccaagttaaagaccaagagttataggagggagtccatcctcagctccagcccaaatgcaggctccaagcggacccccgagctgttgggaagtgcagagagccagggcatttttccatgcagagagtgtgaaagggtgtttgacaagatcaagagtcgaaatgcccatatgaagcggcaccgccttcaggaccacgtggagcccatcatcagggtgaagtggccagtgaagcccttccagctaaaggaagaggagctgggagctgacatcggccccctgcagtggtgactcccgtggcagcaagtccgaatggggcctccagtgctgcccctcctcccttcggcctctccagggcgtttggggcacccctctgcctccccccaccctccctgtcccctgttggccaacctgcctgcaaacatggagggcatttggccacagataggcaggaggagctcagttgtcggacagctatgcagtccctgtccggtggtgctggaggctccactctccttaggttcatagtctctccccttctttcccttccacttctagagcagggaggcttggggaggggaaaatttagctctgggtagctcttaaatcttagcctcagttgtggggtttggtttcatgtgttagataaggccaagacttagagaatcagtgggaaaaaaccttgagatctccaacacgctgggcccctccctggggcggggactctaccttccagattcagtccctagtcttgcgatgaattctgcattgttcggtgttttttgtacatgtcaactcgtaaatctgattaaattgggttcttga

SEQ ID NO: 534 - protein, 1346 aa, Homo sapiens
MDQYSLGDEGALPSEMHLPSFSESQGLNCSDTLNRDLGPNTRGFLYAGLSGLDPDPSLPTPDMSSEVLEDNLDTLSLYSGKDSDSVKLLEEYADSESQASLQDLGLGVLKAKEADEGGRATSGSARKGKRQHSSPQNPLLDCSLCGKVFSSASSLSKHYLTHSQERKHVCKICSKAFKRQDHLTGHMLTHQKTKPFVCIEQGCSKSYCDYRSLRRHYEVHHGLCILKEAPPEEEACGDSPHAHESAGQPPPSSLRSLVPPEARSPGSLLPHRDLLRRIVSSIVHQKTPSPGPAPAGASDSEGRNTACPCPASSGSSSCTPAGPHAAPAALDTELPEEPCLPQKEPATDVFTAPNSRAAENGAPDPPEPEPDTALLQARSTAECWPEGGSVPACLPLFRGQTVPASSQPSSHSFQWLRNLPGCPKSKGNNVFVVHKPSAVPSREGSESGPGPSSGSPSEESPPGPGGGLEDALPFPAALLRVPAEAPSDPRSASGEDDPCAPKKVKVDCDSFLCQNPGEPGLQEAQKAGGLPADASPLFRQLFLKSQEPLVSHEQMQVFQMITKSQRIFSHAQVAAVSSQLPAPEGKPAALRPLQGPWPQQPPPLAPAVDSLHAGPGNPEAEGSPARRRKTTPGVPREASPGSTRRDAKGGLKVAAVPTPLAAPSLDPSRNPDISSLAKQLRSSKGTLDLEDIFPSTGQRQTQLGGEEPPGASLPGKQAPAENGAASRITKGEKGPACSRGGGYRLLGNPRAPRFSGFRKEKAKMDMCCAASPSQVAMASFSSAGPPADPSKSKLTIFSRIQGGNIYRLPHPVKEENVAGRGNQQNGSPTDWTKPRSTFVCKNCSQMFYTEKGLSSHMCFHSDQWPSPRGKQEPQVFGTEFCKPLRQVLRPEGDRHSPPGTKKPLDPTAAAPLVVPQSIPVVPVTRHIGSMAMGQEKDGEERDSKESSQQRKRKKRPPPSTAGEPGPAGCHQSRLRSPMFLVDCLLKGLFQCSPYTPPPMLSPIREGSGVYFNTLCSTSTQASPDQLISSMLDQVDGSFGICVVKDDTKISIEPHINIGSRFQAEIPELQERSLAGTDEHVASLVWKPWGDMMISSETQDRVTELCNVACSSVMPGGGTNLELALHCLHEAQGNVQVALETLLLRGPHKPRTHLLADYRYTGSDVWTPIEKRLFKKAFYAHKKDFYLIHKMIQTKTVAQCVEYYYIWKKMIKFDCGRAPGLEKRVKREPEEVERTEEKVPCSPRERPSHHPTPKLKTKSYRRESILSSSPNAGSKRTPELLGSAESQGIFPCRECERVFDKIKSRNAHMKRHRLQDHVEPIIRVKWPVKPFQLKEEELGADIGPLQW

SEQ ID NO: 535 - DNA, 110 bp, Homo sapiens
gagggccggcgcagatgtccaagttctcctacccaacagtcccaggggtgatgccccagcaccaggtgtctgagccagaatggaagaaaggcctgccttggagggcaaag

SEQ ID NO: 536 - DNA, 9419 bp, Homo sapiens
atggaggttccagaacccacctgccctgcccctcctgcgagggaccagccagctcccactcctggccctccaggggccccaggtggccaggcctcacctcacctgaccctgggccctgtccttctgccgccagagcagggcctggccccccccactgtgttcctgaaggccctgcccatcccactgtaccacacggtgcctcccgggggcctccagccccgcgccccgctagtgacgggcagcctagatgggggcaacgtgcccttcatactcagccctgtgctgcagcctgaagggcctggccccacccaggtggggaagccggcggcccctacgctgacggtgaacatcgtgggcactctgcctgtcctgtcgccgggcctgggccccacgctgggcagcccaggcaaggtgcggaatgcgggcaagtacctgtgtccgcactgtggtcgcgactgcctgaagcccagtgttctagagaagcacatccggtcccacacgggtgagaggcccttcccgtgtgccacctgcggcatcgcctttaagacccagagcaatctctacaagcacaggcggacgcagacgcacctcaacaactcccggctgtcctcagagtccgagggcgccgggggcggcctcctggaggaaggggacaaggccggagagccccccagaccagagggcaggggcgagagcaggtgccaggggatgcacgaaggcgcctcggagagacccctttctccgggtgcccacgtgcccctacttgccaagaacctggatgtgaggaccgaagctgctccctgtccagggtccgcatttgccgacagagaggctccttgggactctgcccccatggcgtcacctgggctcccagcggccagcacacaaccctggcgtaagttgccagagcagaagtcgccgaccgccgggaagccgtgcgccctgcagcggcagcaggcgacggcagcggagaagccctgggatgccaaggcccccgagggccggctgcggaagtgtgagagcaccgactcggggtacctgtcgcgctccgacagcgcggagcagccgcatgcgccctgcagccccctgcacagcctttcggagcacagcgccgagtccgagggggagggcggcccgggcccggggccaggggtcgcaggggccgagcccggggcgcgagaagccggcctggagctggagaagaagcggctggaggagcgcatcgcccagctcatctcccacaaccaggcggtggtggacgatgcccagctggacaacgtgcggccccggaagaccgggctgtccaaacagggcagcatcgacctgcccacgccctacacctacaaggactccttccactttgacatccgcgcgctggagccaggccgtaggagggccccgggccccgtgcgctccacctggacgcccccagacaagtctcggcccctcttcttccactccgtccccactcagctctccaccaccgtggaatgtgtccccgtcaccaggagcaactcgctgcccttcgtcgagggctccaggacgtggctggagcccagggagccccgggacccctggtccaggacgcagaagcctctgagccccaggcccggcccagcccgcctgggctgccgctcgggactaagctcgactgacgttcccagtgggcatccccgggccctggtcagacaggccgcggtggaggacctgccaggcacccccattggcgatgccctggtgcccgcagaggacacagacgcaaagagaactgctgcgcgggaggccatggccggcaagggcagagcgggcggcaggaagtgcggccagagaaggctgaagatgttctcccaggagaagtggcaggtgtacggggatgagacgttcaaaaggatctaccagaaaatgaaagccagtccccatggaggcaagaaagccagggaggtgggaatgggcagtggggcagaactgggctttcctctgcagaaagaggcagcagggagctcaggcacagtccccacccaagacaggaggacccctgtccatgaggacatatccgcaggggcaacgccagagccttggggaaatccaccagccctggaggcctccttggtgactgaacccactaagcatggggagacggtggccaggagaggagacagtgaccgacccagggtggaagaggctgtgtcatcccctgcactgggtggcagagacagtccctgttcaggcagtaggagccccctggtctctccaaatgggaggctggaactggggtggcagatgcccccagcacctggccccctcaaagggggtgatgtagaggctcccaggccagtttggccggaccccaagctggaaggaggtgcccgaggtgtgggggatgttcaggagacctgcctgtgggcccagactgtcctgagatggcccagcaggggctcaggggaggacaagctcccctcagagaggaagaagctgaaagtggaggacctgcacagctggaagcaaccagagcctgtgagcgcagagaccccaggtgggcccacgcagcctgcctctttgtcatcccagaagcaggatgccgatcccggggaggtgccagggggctcaaaggagagtgccaggcaggtgggcgagcctctggagtcctctggagcctccttggctgctgcttctgttgccctgaagagggtggggccaagggacaaggctaccccactgcatcctgcagccccagcccccgcagagcacccctcgctggccaccccacctcaggctcctagagtgctctctgccctggcagataatgccttttcccccaagtacctcctcaggttacctcaggcagagacccccttaccactgcccattccctggggaccaaggcacagccaggactctctctgcagcagtgggtggcctgaagaacgggcatcatttgttgggtcaggactggggacccctctttctcccagcccagcctcaggcccctccccaggtgaggcggacagcatcctggaggaccccagctgttccaggccacaggatgggagaaaaggggcacagttggggggggacaagggggacaggatggccactagcaggccagcagccagggagttgcccatctcagcaccaggggctcccagggaggctacctcctccccgcccactccaacgtgtgaggcacacttagttcaggacatggagggtgacagccaccgtatccatcgcctctgcatgggcagcactttggcaagggccaggctctctggggatgtcctgaatccctgggtacccaactgggagctgggggagcctcctgggaatgccccagaagatccttcttcagggcccctggtgggccccgacccgtgttcccccctccagcctggctccttcctcactgccctcactcggcctcagggtgtgcccccaggctggccagagctggccttgtcttcccactcagggacgtcccggagccacagcacccgcagtccccacagcacccaaaacccctttccctcactgaaggctgagccgcggctcacgtggtgttgcctgagccgcagtgtccctctgcccgcggagcagaaggcaaaggcggcatctgtgtacttggcggtgcactttcctggtagcagcctccgagatgagggtcccaatggccctcctgggagcaatggaggatggacctggacaagccctggagaaggagggccggcgcagatgtccaagttctcctacccaacagtcccaggggtgatgccccagcaccaggtgtctgagccagaatggaagaaaggcctgccttggagggcaaagatgtctcgtgggaacagcaagcagagaaaactgaagatcaaccctaaaaggtacaaagggaatttcttgcagagctgtgttcagctgagagccagtagacttcgcacaccaacctgggtgcgaagaagaagccgccaccctcccgcacttgagggactgaagccatgcaggacccctgggcagacctcttcagaaatagcaggtctgaatctgcaagaggagccatcttgtgccacctcagaatcacctccttgttgtgggaaggaagagaagaaggaaggtgactgcagacaaaccttaggaaccctctctcttggtacaagttcaagaattgtcagggaaatggacaaacgaactgtgaaggatatttctccatctgctggtgagcatggtgactgtactactcacagcactgctgccacatcaggattatctctgcaatctgacacctgcctggcagtggttaatgacgtgcctctaccccctggcaaaggtcttgaccttgggttgctggagactcagctgctggcctcccaggattcagtctcaacagatcccaaaccatacatcttctcagatgctcaaaggccttcttcctttgggtccaaaggaacttttccccaccatgacattgctacctctgtggctgccgtttgtatttctctgccagtgagaacagatcacatagcccaggaaattcacagtgctgaatcacgagaccacagccagactgcagggaggactctgacatcaagctccccagacagcaaagtcacagaagagggcagagcacagaccctcttgccagggagaccttcatctggacaaagaatttcagattcggttccactggagtcaactgaaaaaactcatcttgaaataccagcttcaggaccaagttcagctagttcacaccacaaggaagggagacacaagacgttttttccttccagaggccagtatgggtgtggggaaatgactgtcccctgcccctctttaggaagtgacggtaggaaacgtcaggtatctggattaatcactcggaaagattctgtggttccttctaagccagagcagcccatagaaattcctgaagccccttctaaatccctcaagaagaggagtctggaaggaatgagaaagcaaactcgagtagagttcagtgacaccagcagcgacgatgaagaccgattagttatagaaatatgaagcttccagagaaacatggtgtctggtcaaaaagactgttgacgcttcacaagtaaatgttgtcaggctggcggaagaactaaactctatctgtgaaacacctacagattaggaaagccattttgagttatttacaagccaactccaaccaacttctgacccccaactcagccgcagcgttccccagctccccttgggagtgctctgctcatcttcaaatggtgccaggcagggcagacatggcaaggaagcaaactctgcaaatggtcaacgtgcacagtgactgggccttgactcccagcctcgtcttctgcacctgtcccccactgcctctctgcaatcaaatggcactaaccaagaaagccaccatcaacacatttctccacaagtggaccccacacagtcgaggcaactggctttctccattagtaaactgaggatttgcttccaaggtggagagcacacttgggataattggagtagcttgacaaagagacgggggtgtgaactgggcacaaagatacttctgttcattttggagacaaaattcagatacattaaaaaactgaagcttgttcagagtaattcacgtccttggtggagttgtaaatacacttcaaaatgcctatgatccggtgacatgctgattacttttaaatgttgcacaaatggtcaatgcttatttatggtcagatgatgcaagcacatgctcttgtgcctggtgcgtttgctgtggagatctctgagactgtcggtttttctagttcttgcaaaggaacggtgttaaaagttaatagaactgtctctctgtaatgagtcattttttgagagggaaaaattcacttattttcctctgattcttcttgtcatattgtgctctgagcaatttcaattagagggttacattttagtaatctgtacagcttcaactgatgcctgctcgtcgtgacgggagccttttagatttccttcagaagcttcaaggatacaaaactaattggagttttgacgctgttttacatctcggtaattttattttcggggcttagtgttactttgctgtcaaattaaatcagcctctgtattgtgcacgtcagaactgcacagagaaaattccccagtattccaagccggtgcgcccctgtgcagaagaaaacagatctacgtcagccagcccggggggcaaagcctcagttccactgccttcctctccctctccttccacgggagaggagaaacttaaagaggtttacattgctgcatttcaataaaattttatacttgcttttggtatgattttgtacaatttgaaatttgtagctgagctcttttggtgtaactttgatgtaatgatgttcatatgacatcttgtacttcagagacacagcagcaatgcagagcatctcacacatgtgaatacacttcagtcagtctgtgcctgtgactaagtatggtcaaatttcaagtatcttcatgtgaattttccaattttggtgtttttcatagaaaacttcaatgccagaccagcttccctggttacttagcatatatttgtgaccatttcatatgcactcataaatatccaaggatttcaggcccagccaagaaaaacataagaagggaggtaaaaaggatgttggacattgacttagtgtactttttaaacccaacaaaagcgatgtggtgattatctcccttttcgaaggattcatgccactgtaatgagagaggcagtgtaggcaaatggtctgagccttggatggagattgaagtcctgactttagctgggaaatcttggttaagagtctttctgtaccttagtttccctaagtgagaataagagagttggacaagacgaatgtatctccaggttccaatttttctgagaatggttgatagagaagctgctctctccttaaaatgcatggactcaatggcttgaagatattccccatggggaaccattgccacggaggccttgcatgcaagaagtttgggtggggacagtgaggaactgaaacacaagcaccttccaccaattattgctgtgaagaacctgagcctgaagaagctccatctaattttttccccagagttccagattttagggtgcaatcatccagcctatacatgtggctcatagttcaaaaaattaaaagcaaaaccagaactctccagtaggaatggagaaaacctatctgtaggctgaactggctcctttgtcttaggaggcactggtcaggggaaaaaagctgtcttccagacccctcctttctgggtggctactgtggaatcaacggggtcactggctgtaaatcagtaagtcatagctccaaacagcaccaacttcaggatgatggtggaagctctgtccctataggagccaccgttgccagctgtcacatcccaacctaggtcaaatatggcggaatattgatttcgtctctaactccctgtatctcttacaaaggtaaagcaggtagcgaagccaccttgcttccctggtctttgcctagtggctggcaatgtttacaagtgtaccttactttatatcaacatgaatttgtgaaaaagctgtatgtcaatggattttttaaaaattaaaaatgtattttgaatgaccctaagggagctggctctttaaaagcatcctaaggtaaagattttttttaaatgaagaatctttttataaagcaatgaacaatctctgattttataaatcttaattttcctatgggttttcttaaagtgaaatacaattataagaatacattttaagggtaacattaacaacctagaacccagtttgggttactaaaaataaaatgtcagtattatcaattgataactaccacagttttatactctgcaagtgtgtactgcatgatggttaaggaaaaacaaatttattttagaacaaagcaaaccagagtttaaagatcagggatttccttctttccccagtgctaattttcccagtgttaattttattatatctttaggtaagggtcttaaccaactgatgcctcagtttcttccacagagaatagttagagggatgctgtcatgaactaagggaagggcactgaatttttttttgccaatatcaaaagtgacatttccccatgatgttcaagactcaccaggtttctctctccacctgtacctacacccagctagatcttgtcgttaaagatgtatggagggaagaggtttcaatccttccctccttggcaacctacattgttaagtgactcaaagtcatgtgatttttggtggacaactggaatcctccttcttgtaaaacacattgaaaaacagctcatctctcctgttaggcttaacccttgagatttgagacaaagctaataatcccctttggttcacatctcacagtaaccaggagaacctatggttcatttgccaagtgattaaaaaaaaagatggaggagggtgtctctgaattttaatggaaacactgccaatagcatggtgggtaacctagggcaagacagactttttcttcctgaaatcactcttctaaagctgagaccggaagaggaaccttgcagaagtgcactgtgaccacagttcttggcatgaaagataaacaatttgcagtctcatgccaaaaagtatttccttgcatttacattcattacttagaatgatcacattattcatttttttccccagcacagaaatttgcattttgcacagaatttgcctggtgcagcagatctttatagttatggaaactgtcatcattatcggaatgtgctgctgctcaactccccagacataatttaatatggtgaggagaatatgacctgcctggctctatgggtgatcatatttctactgctgcagcaagctgggcttgtgtatttttcctcacttcagttgttcttcccatagttcatgtagggaggcactttggcttttgaaacactacatttctcaatatttaagcacaatttattgtccttatttttcagaacccattaaatataagggtcagaacctagaaaatcttatgtgctggatttctaccctgtatgattcttttcatccatgctttgcacttacgtaggaatatacataatttggtctgaagaagtataggaacagttgagcacattacttcaccactggaagaataggaaccagggaaaaacatcagcctctgccacttggagcactagaggatgacggaatgtcttgtatatgcggtcaactgttcaggatttactactcaattggttgttcacaatcagggaaatgattggcttcttggttgtttgttgaactttctttctttatatggttaaattattttgttttgataaaaataaaacttaaaatgcaaaaaaaaaaaaaaaaaa

SEQ ID NO: 537 - protein, 1677 aa, Homo sapiens
MEVPEPTCPAPPARDQPAPTPGPPGAPGGQASPHLTLGPVLLPPEQGLAPPTVFLKALPIPLYHTVPPGGLQPRAPLVTGSLDGGNVPFILSPVLQPEGPGPTQVGKPAAPTLTVNIVGTLPVLSPGLGPTLGSPGKVRNAGKYLCPHCGRDCLKPSVLEKHIRSHTGERPFPCATCGIAFKTQSNLYKHRRTQTHLNNSRLSSESEGAGGGLLEEGDKAGEPPRPEGRGESRCQGMHEGASERPLSPGAHVPLLAKNLDVRTEAAPCPGSAFADREAPWDSAPMASPGLPAASTQPWRKLPEQKSPTAGKPCALQRQQATAAEKPWDAKAPEGRLRKCESTDSGYLSRSDSAEQPHAPCSPLHSLSEHSAESEGEGGPGPGPGVAGAEPGAREAGLELEKKRLEERIAQLISHNQAVVDDAQLDNVRPRKTGLSKQGSIDLPTPYTYKDSFHFDIRALEPGRRRAPGPVRSTWTPPDKSRPLFFHSVPTQLSTTVECVPVTRSNSLPFVEGSRTWLEPREPRDPWSRTQKPLSPRPGPARLGCRSGLSSTDVPSGHPRALVRQAAVEDLPGTPIGDALVPAEDTDAKRTAAREAMAGKGRAGGRKCGQRRLKMFSQEKWQVYGDETFKRIYQKMKASPHGGKKAREVGMGSGAELGFPLQKEAAGSSGTVPTQDRRTPVHEDISAGATPEPWGNPPALEASLVTEPTKHGETVARRGDSDRPRVEEAVSSPALGGRDSPCSGSRSPLVSPNGRLELGWQMPPAPGPLKGGDVEAPRPVWPDPKLEGGARGVGDVQETCLWAQTVLRWPSRGSGEDKLPSERKKLKVEDLHSWKQPEPVSAETPGGPTQPASLSSQKQDADPGEVPGGSKESARQVGEPLESSGASLAAASVALKRVGPRDKATPLHPAAPAPAEHPSLATPPQAPRVLSALADNAFSPKYLLRLPQAETPLPLPIPWGPRHSQDSLCSSGWPEERASFVGSGLGTPLSPSPASGPSPGEADSILEDPSCSRPQDGRKGAQLGGDKGDRMATSRPAARELPISAPGAPREATSSPPTPTCEAHLVQDMEGDSHRIHRLCMGSTLARARLSGDVLNPWVPNWELGEPPGNAPEDPSSGPLVGPDPCSPLQPGSFLTALTRPQGVPPGWPELALSSHSGTSRSHSTRSPHSTQNPFPSLKAEPRLTWCCLSRSVPLPAEQKAKAASVYLAVHFPGSSLRDEGPNGPPGSNGGWTWTSPGEGGPAQMSKFSYPTVPGVMPQHQVSEPEWKKGLPWRAKMSRGNSKQRKLKINPKRYKGNFLQSCVQLRASRLRTPTWVRRRSRHPPALEGLKPCRTPGQTSSEIAGLNLQEEPSCATSESPPCCGKEEKKEGDCRQTLGTLSLGTSSRIVREMDKRTVKDISPSAGEHGDCTTHSTAATSGLSLQSDTCLAVVNDVPLPPGKGLDLGLLETQLLASQDSVSTDPKPYIFSDAQRPSSFGSKGTFPHHDIATSVAAVCISLPVRTDHIAQEIHSAESRDHSQTAGRTLTSSSPDSKVTEEGRAQTLLPGRPSSGQRISDSVPLESTEKTHLEIPASGPSSASSHHKEGRHKTFFPSRGQYGCGEMTVPCPSLGSDGRKRQVSGLITRKDSVVPSKPEQPIEIPEAPSKSLKKRSLEGMRKQTRVEFSDTSSDDEDRLVIEI
